(19) United States
(12) Patent Application Publication
(10) Pub. No.: US 2026/0103824 A1
(43) Pub. Date: Apr. 16, 2026

(54) Compositions and Methods for Selectively Synthesizing Triple-indexed cDNA Libraries

(71) Applicant: The Rockefeller University, New York, NY (US)

(72) Inventors: Junyue Cao, New York, NY (US); Wei Zhou, New York, NY (US); Jasper Lee, New York, NY (US); Ziyu Lu, New York, NY (US); Melissa Zhang, New York, NY (US); Andras Sziraki, New York, NY (US); Zihan Xu, New York, NY (US)

(21) Appl. No.: 19/114,973

(22) PCT Filed: Sep. 26, 2023
(86) PCT No.: PCT/US2023/075123

§ 371 Date: Mar. 25, 2025

Related U.S. Application Data
(60) Provisional application No. 63/377,061, filed on Sep. 26, 2022.
(60) Provisional application No. 63/385,479, filed on Nov. 30, 2022.

(51) Int. Cl. C40B 40/06; C12N 5/00; C12N 15/10; C12Q 1/25; C12Q 1/48; C12Q 1/6806; C12Q 1/686; C12Q 1/6876; C40B 50/00; C40B 70/00

(52) U.S. Cl. CPC C40B 40/06; C12N 5/0081; C12N 15/10; C12Q 1/25; C12Q 1/48; C12Q 1/6806; C12Q 1/686; C12Q 1/6876; C12Y 207/07049; C12Y 605/01001; C40B 50/00; C40B 70/00

(57) ABSTRACT

Provided herein are methods for preparing a sequencing library from a plurality of single cells that includes nucleic acids having three index sequences, as well as methods for generating an RNA sequencing library from single cells that can be used to dissect the critical regulators of gene-specific transcription, splicing, and degradation in a massive-parallel manner. Also provided herein are compositions, such as oligonucleotide sets for generating the sequencing libraries and kits for preparing the sequencing libraries.

### CROSS REFERENCE TO RELATED APPLICATIONS

[0001] This application claims priority to U.S. Provisional Application No. 63/377,061, filed Sep. 26, 2022 and to U.S. Provisional Application No. 63/385,479, filed Nov. 30, 2022, each of which is hereby incorporated by reference herein in its entirety.

### STATEMENT REGARDING FEDERALLY SPONSORED RESEARCH OR DEVELOPMENT

[0002] This invention was made with government support under Grant No. 1DP2HG012522, Grant No. 1R01AG076932 and Grant No. RM1HG011014 awarded by the National Institutes of Health (NIH). The government has certain rights in the invention.

### BACKGROUND OF THE INVENTION

[0003] New neurons and glia cells are continuously produced in the adult mammalian brains, a critical process associated with memory, learning, and stress (Lugert et al., Cell Stem Cell 6, 445-456 (2010); Spalding et al., Cell 153, 1219-1227 (2013)). There is a consensus that adult neurogenesis and oligodendrogenesis decline with advancing ages and in neuropathological conditions (Pollina et al., Oncogene 30, 3105-3126 (2011); Galvan et al., Clin. Interv. Aging 2, 605-610 (2007)), but to what extent is debated (Sorrells et al., Nature 555, 377-381 (2018); Mathews et al., Aging Cell 16, 1195-1199 (2017)). The ambiguity mainly stems from technical limitations-most studies rely upon the utilization of proxy markers and are unreliable in accurately quantifying the dynamics of rare progenitor cells. Therefore, novel approaches to precisely capturing newborn cells and tracking their dynamics are critical to understanding brain cell population dynamics in development, ageing, and diseases.

[0004] Cellular functions are determined by the expression of millions of RNA molecules, which are tightly regulated by their synthesis, splicing, and degradation. However, understanding how key regulators impact genome-wide RNA kinetics is constrained by existing tools, which provide only snapshots of the transcriptome (Jaitin et al., Cell 167, 1883-1896.e15 (2016); Adamson et al., Cell 167, 1867-1882.e21 (2016); Dixit et al., Cell 167, 1853-1866.e17 (2016); Xie et al., Mol. Cell 66, 285-299.e5 (2017); Datlinger et al., Nat. Methods 14, 297-301 (2017); Hill et al., Nat. Methods 15, 271-274 (2018); Replogle et al., Cell 185, 2559-2575.e28 (2022); Replogle et al., Nat. Biotechnol. 38, 954-961 (2020)).

[0005] The mammalian brain is a remarkably complex system made up of millions or billions of highly heterogeneous cells, comprising a myriad of different cell types and subtypes (Ero et al., Front. Neuroinform. 12, 84 (2018); Zeisel et al., Cell 174, 999-1014.e22 (2018)). Progressive changes in brain cell populations, which occurs during the normal aging process, may contribute to functional decline and increased risks for neurodegenerative diseases such as Alzheimer's disease (AD) (Mathys et al., Nature 570, 332-337 (2019); Xia et al., Aging Cell 17, el2802 (2018)). While the recent advances in single-cell genomics are creating unprecedented opportunities to explore the cell-type-specific dynamics across the entire mammalian brain in aging and AD models (Ximerakis et al., Nat. Neurosci. 22, 1696-1708 (2019); Morabito et al., Nature Genetics vol. 53 1143-1155 (2021); Tabula et al., Nature 583, 590-595 (2020); Wang et al., Nucleic Acids Res. (2022) doi:10.1093/nar/gkac633), most prior studies relied on a relatively shallow sampling of the brain cell populations, decreasing their abilities to investigate the dynamics of the global brain population and to identify rare aging or AD-associated cell types. While providing proof of key concepts, the prior studies were technically limited in several ways, including failing to recover isoform-level gene expression patterns for rare cell types, providing few insights into how the chromatin landscape regulates cell-type-specific alterations across aging stages, and often lacking integrative analyses with spatial visualization to explore the anatomic region-specific changes.

[0006] Single-cell RNA sequencing by combinatorial indexing has previously been developed, which provides a methodological framework involving split-pool barcoding of cells or nuclei for single-cell transcriptome profiling (Cao et al., Science 357, 661-667 (2017). While the method has been widely used to study embryonic and fetal tissues (Cao et al., Nature 566, 496-502 (2019); Cao et al., Science 370, (2020)), it remains restricted to gene quantification proximal to the 3′ end (i.e., full-length transcript isoform information is lost) and is limited in terms of efficiency and cell recovery (up to 95% cell loss rate) (Cao et al., Nature 566, 496-502 (2019)), which pose a challenge when dealing with aged tissues.

[0007] There is thus a need in the art for improved methods for single-cell RNA sequencing. The present invention addresses this unmet need in the art.

### SUMMARY OF THE INVENTION

[0008] In one embodiment, the invention relates to a method for preparing a sequencing library comprising nucleic acids from a plurality of single nuclei or cells, the method comprising:
[0009] (a) providing a plurality of nuclei or cells in a first plurality of compartments, wherein each compartment comprises a subset of nuclei or cells;
[0010] (b) labeling and processing RNA molecules in the subsets of cells or nuclei obtained from the cells; wherein the labeling comprises adding to RNA molecules present in each subset of nuclei or cells a first compartment specific index sequence to result in indexed DNA nucleic acids present in indexed nuclei or cells, wherein the method comprises the steps of contacting the RNA molecules with a reverse transcriptase, a reverse transcription primer from a set of indexed reverse transcription primers that anneals to a polyA tail of RNA molecules, an indexed random hexamer primer from a set of indexed random hexamer primers, or a combination thereof;
[0011] (d) combining the indexed nuclei or cells to generate pooled indexed nuclei or cells;
[0012] (e) providing the plurality of nuclei or cells in a second plurality of compartments, wherein each compartment comprises a subset of nuclei or cells;
[0013] (f) labeling the indexed DNA nucleic acids in the subsets of cells or nuclei obtained from the cells; wherein the process of labeling comprises adding to the indexed DNA nucleic acids present in each subset of nuclei or cells a second compartment a specific indexed ligation primer from a set of indexed ligation primers to result in double indexed DNA molecules present in double indexed nuclei or cells, wherein the labeling comprises the steps of: contacting the indexed DNA molecules with a chemically modified DNA ligation primer/adaptor complex and a DNA ligase, and ligating the compartment specific DNA ligation primer to the indexed DNA molecules to generate double indexed single stranded DNA (ssDNA) molecules;
[0014] (g) combining the double indexed nuclei or cells to generate pooled double indexed nuclei or cells;
[0015] (h) providing the plurality of double indexed nuclei or cells in a third plurality of compartments, wherein each compartment comprises a subset of nuclei or cells;
[0016] (i) generating double indexed double stranded DNA (dsDNA) molecules by contacting the ssDNA molecules with a second-strand synthesis enzyme mix and synthesizing a second complementary DNA strand;
[0017] (j) performing bead-based purification of the double indexed dsDNA molecules;
[0018] (k) performing tagmentation on the purified dsDNA molecules;
[0019] (l) labeling the double indexed DNA nucleic acids in the subsets of cells or nuclei obtained from the cells; wherein the process of labeling comprises adding to the double indexed DNA molecules present in each subset of nuclei or cells a third compartment specific index sequence to result in triple indexed DNA nucleic acids present in triple indexed nuclei or cells, wherein the labeling comprises contacting the double indexed DNA molecules with a compartment specific indexed PCR primer (referred to as P7), a universal PCR primer (referred to as P5), and a polymerase, and performing PCR amplification of the double indexed DNA molecules to generate triple indexed DNA molecules.

[0020] In one embodiment, the reverse transcriptase comprises Maxima Reverse Transcriptase.

[0021] In one embodiment, the set of oligo-dT primers comprises a set of primers comprising sequences selected from the sequences as set forth in Table 3.

[0022] In one embodiment, the set of indexed random hexamer primers comprises a set of primers comprising sequences selected from the sequences as set forth in Table 4.

[0023] In one embodiment, the set of indexed ligation primers comprises a set of primers comprising sequences selected from the sequences as set forth in Table 5.

[0024] In one embodiment, the adaptor comprises SEQ ID NO: 2445.

[0025] In one embodiment, the ligation is performed using T4 ligase.

[0026] In one embodiment, the method further includes one or more steps selected from the group consisting of:
[0027] a) nuclei extraction;
[0028] b) nuclei fixation; and
[0029] c) nuclei storage
[0030] which are performed prior to step a) of claim 1.

[0031] In one embodiment, the step of nuclei extraction is performed using a buffer comprising 1% DEPC and 0.1% SUPREase.

[0032] In one embodiment, the step of nuclei fixation is performed by contacting extracted nuclei with 0.1% formaldehyde for 10 minutes.

[0033] In one embodiment, the method of nuclei storage comprises contacting nuclei with 10% DMSO and then freezing.

[0034] In one embodiment, the compartment comprises a well or a droplet.

[0035] In one embodiment, the compartments of the first plurality of compartments comprise from 50 to 20,000 nuclei or cells.

[0036] In one embodiment, the compartments of the second plurality of compartments comprise from 50 to 20,000 nuclei or cells.

[0037] In one embodiment, the compartments of the third plurality of compartments comprise from 50 to 20,000 nuclei or cells.

[0038] In one embodiment, the method further comprises pooling and collecting the triple indexed nucleic acids, thereby producing a sequencing library from the plurality of nuclei or cells.

[0039] In one embodiment, the invention relates to a kit for use in preparing a sequencing library, the kit comprising at least one set of indexed oligonucleotides.

[0040] In one embodiment, the kit comprises a set of 192 indexed primers as set forth in Table 3.

[0041] In one embodiment, the kit comprises a set of 192 indexed primers as set forth in Table 4.

[0042] In one embodiment, the kit comprises a set of 382 indexed primers as set forth in Table 5.

[0043] In one embodiment, the invention relates to a method for preparing a sequencing library for determination of transcriptome kinetics, the method comprising:
[0044] a) providing a plurality of cells comprising an expression construct for expression of a catalytically dead Cas9 protein;
[0045] b) contacting the cells of a) with an sgRNA library;
[0046] c) culturing the cells of b) in the presence of a selection agent for selection of cells containing an sgRNA library molecule;
[0047] d) splitting the cells of c) into
   [0048] i) a first population of cells for generation of a first “bulk” sequencing library; and
   [0049] ii) a second population of cells for subsequent culturing;
[0050] e) culturing the cells of d) ii) in the presence of at least one of:
   [0051] i) an inducing agent to induce expression of the catalytically dead Cas9 protein;
   [0052] ii) at least one agent for perturbing cells; and
   [0053] iii) at least one agent for sensitizing cells to perturbations;
[0054] f) culturing at least a portion of the cells of e) in the presence of an RNA metabolic label to label nascent transcripts;
[0055] g) splitting the cells of f) into
   [0056] i) a first population of cells for generation of a second “bulk” sequencing library; and
   [0057] ii) a second population of cells for subsequent chemical conversion and indexing;
[0058] h) chemically converting the RNA metabolic label in the RNA molecules from the cells of g) ii);
[0059] i) generating one or more sequencing library from the DNA molecules, RNA molecules, or a combination thereof, from the cells of step d) i), step g) i) and step h).

[0060] In one embodiment, the catalytically dead Cas9 protein is under the control of an inducible promoter.

[0061] In one embodiment, the promoter is inducible by contacting the cell with doxycycline (Dox).

[0062] In one embodiment, the inducing agent of step e) i) comprises doxycycline.

[0063] In one embodiment, the catalytically dead Cas9 protein comprises Dox-inducible dCas9-KRAB-MeCP2.

[0064] In one embodiment, the method of step e) iii) comprises culturing the cells in L-glutamine+, sodium pyruvate−, high glucose DMEM.

[0065] In one embodiment, the cell culture medium further comprises doxycycline.

[0066] In one embodiment, the sgRNA library comprises a library of plasmids encoding at least 500 different sgRNA molecules.

[0067] In one embodiment, the RNA metabolic label comprises 4-thiouridine (4sU).

[0068] In one embodiment, the method of step i) includes the steps of:
[0069] a) providing a plurality of nuclei or cells in a first plurality of compartments, wherein each compartment comprises a subset of nuclei or cells;
[0070] b) labeling and processing RNA molecules obtained from the cells; wherein the labeling comprises adding to RNA molecules present in each subset of nuclei or cells a first compartment specific index sequence to result in indexed DNA nucleic acids present in indexed nuclei or cells, wherein the method comprises the steps of contacting the RNA molecules with a reverse transcriptase, a reverse transcription primer from a set of indexed reverse transcription primers that anneals to a polyA tail of RNA molecules, an indexed random hexamer primer from a set of indexed random hexamer primers, or a combination thereof;
[0071] c) combining the indexed nuclei or cells to generate pooled indexed nuclei or cells;
[0072] d) providing the plurality of nuclei or cells in a second plurality of compartments, wherein each compartment comprises a subset of nuclei or cells;
[0073] e) labeling the indexed DNA nucleic acids in the subsets of cells or nuclei obtained from the cells; wherein the process of labeling comprises adding to the indexed DNA nucleic acids present in each subset of nuclei or cells a second compartment specific indexed ligation primer sequence to result in double indexed DNA molecules present in double indexed nuclei or cells, wherein the labeling comprises the steps of: contacting the indexed DNA molecules with a chemically modified DNA ligation primer/adaptor complex and a DNA ligase, and ligating the compartment specific DNA ligation primer to the indexed DNA molecules to generate double indexed single stranded DNA (ssDNA) molecules;
[0074] f) combining the double indexed nuclei or cells to generate pooled double indexed nuclei or cells;
[0075] g) providing the plurality of double indexed nuclei or cells in a third plurality of compartments, wherein each compartment comprises a subset of nuclei or cells;
[0076] h) generating double indexed double stranded DNA (dsDNA) molecules by contacting the ssDNA molecules with a second-strand synthesis enzyme mix and synthesizing a second complementary DNA strand;
[0077] i) performing bead-based purification of the double indexed dsDNA molecules;
[0078] j) performing tagmentation on the purified dsDNA molecules; and
[0079] k) labeling the double indexed DNA nucleic acids in the subsets of cells or nuclei obtained from the cells; wherein the process of labeling comprises adding to the double indexed DNA molecules present in each subset of nuclei or cells a third compartment specific index sequence to result in triple indexed DNA nucleic acids present in triple indexed nuclei or cells, wherein the labeling comprises contacting the double indexed DNA molecules with a compartment specific indexed PCR primer (referred to as P7), a universal PCR primer (referred to as P5), and a polymerase, and performing PCR amplification of the double indexed DNA molecules to generate triple indexed DNA molecules.

[0080] In one embodiment, the set of oligo-dT primers comprises a set of primers comprising sequences selected from the sequences as set forth in Table 3.

[0081] In one embodiment, the set of indexed random hexamer primers comprises a set of primers comprising sequences selected from the sequences as set forth in Table 4.

[0082] In one embodiment, the set of indexed ligation primers comprises a set of primers comprising sequences selected from the sequences as set forth in Table 5.

[0083] In one embodiment, the adaptor comprises SEQ ID NO: 2445.

[0084] In one embodiment, the ligation is performed using T4 ligase.

[0085] In one embodiment, the method further includes one or more steps selected from the group consisting of:
[0086] a) nuclei extraction;
[0087] b) nuclei fixation; and
[0088] c) nuclei storage
[0089] which are performed prior to step a) of claim 2.

[0090] In one embodiment, the step of nuclei extraction is performed using a buffer comprising 1% DEPC and 0.1% SUPREase.

[0091] In one embodiment, the step of nuclei fixation is performed by contacting extracted nuclei with 0.1% formaldehyde for 10 minutes.

[0092] In one embodiment, the method of nuclei storage comprises contacting nuclei with 10% DMSO and then freezing.

[0093] In one embodiment, the compartment comprises a well or a droplet.

[0094] In one embodiment, the compartments of the first plurality of compartments comprise from 50 to 20,000 nuclei or cells.

[0095] In one embodiment, the compartments of the second plurality of compartments comprise from 50 to 20,000 nuclei or cells.

[0096] In one embodiment, the compartments of the third plurality of compartments comprise from 50 to 20,000 nuclei or cells.

[0097] In one embodiment, the method further comprising pooling and collecting the triple indexed nucleic acids, thereby producing a sequencing library from the plurality of nuclei or cells.

[0098] In one embodiment, the invention relates to a method for preparing a sequencing library comprising nucleic acids from a plurality of single nuclei or cells, the method comprising:
[0099] (a) contacting a plurality of nuclei or cells with 5-Ethynyl-2-deoxyuridine (EdU);
[0100] (b) contacting the plurality of nuclei or cells with reagents for Click chemistry ligation to an azide-containing fluorophore;
[0101] (c) sorting the nuclei in a first plurality of compartments, wherein each compartment comprises a subset of nuclei or cells, wherein the sorting enriches for EdU+ nuclei or cells;
[0102] (d) labeling and processing RNA molecules in the subsets of cells or nuclei obtained from the cells; wherein the labeling comprises adding to RNA molecules present in each subset of nuclei or cells a first compartment-specific index sequence to result in indexed DNA nucleic acids present in indexed nuclei or cells, wherein the method comprises the steps of contacting the RNA molecules with a reverse transcriptase, an Oligo-dT primer that anneals to a polyA tail of RNA molecules and an indexed random primer;
[0103] (e) combining the indexed nuclei or cells to generate pooled indexed nuclei or cells;
[0104] (f) sorting the plurality of nuclei or cells into a second plurality of compartments, wherein each compartment comprises a subset of nuclei or cells;
[0105] (g) generating double stranded DNA (dsDNA) molecules by contacting the ssDNA molecules with a second-strand synthesis enzyme mix and synthesizing a second complementary DNA strand;
[0106] (h) performing tagmentation on the dsDNA molecules; and
[0107] (i) labeling the DNA nucleic acids in the subsets of cells or nuclei obtained from the cells; wherein the process of labeling comprises adding to the indexed DNA molecules present in each subset of nuclei or cells an additional compartment specific-index sequence to result in multi-indexed DNA nucleic acids present in multi-indexed nuclei or cells, wherein the labeling comprises contacting the indexed DNA molecules with a compartment specific indexed PCR primer (referred to as P7), a universal PCR primer (referred to as P5), and a polymerase, and performing PCR amplification of the double indexed DNA molecules to generate multi-indexed DNA molecules.

[0108] In one embodiment, the sorting in steps (c) and (f) is performed using FACS sorting gated for fluorophore and DAPI positive nuclei.

[0109] In one embodiment, the oligo-dT primer comprises a 5′ end as set forth in SEQ ID NO:2447 and a 3′ end as set forth in SEQ ID NO:2448 flanking a barcode sequence, wherein the barcode sequence comprises any nucleotide sequence from 5 to 20 nucleotides in length.

[0110] In one embodiment, the compartments of the first plurality of compartments comprise from about 250 to 500 nuclei or cells.

[0111] In one embodiment, the compartments of the second plurality of compartments comprise about 25 nuclei or cells.

[0112] In one embodiment, the method further comprises pooling and collecting the multi-indexed nucleic acids, thereby producing a sequencing library from the plurality of nuclei or cells.

[0113] In one embodiment, the invention relates to a method for preparing a sequencing library comprising nucleic acids from a plurality of single nuclei or cells, the method comprising:
[0114] (a) contacting a plurality of nuclei or cells with 5-Ethynyl-2-deoxyuridine (EdU);
[0115] (b) contacting the plurality of nuclei or cells with reagents for Click chemistry ligation to an azide-containing fluorophore;
[0116] (c) permeabilizing the nuclei or cells;
[0117] (d) sorting the nuclei in a first plurality of compartments, wherein each compartment comprises a subset of nuclei or cells, wherein the sorting enriches for EdU+ nuclei or cells;
[0118] (e) performing tagmentation on the nucleic acid molecules using a barcoded transposase;
[0119] (f) combining the indexed nuclei or cells to generate pooled indexed nuclei or cells;
[0120] (g) sorting the plurality of nuclei or cells into a second plurality of compartments, wherein each compartment comprises a subset of nuclei or cells; and
[0121] (h) labeling the DNA nucleic acids in the subsets of cells or nuclei obtained from the cells; wherein the process of labeling comprises adding to the indexed DNA molecules present in each subset of nuclei or cells an additional compartment specific-index sequence to result in multi-indexed DNA nucleic acids present in multi-indexed nuclei or cells, wherein the labeling comprises contacting the indexed DNA molecules with a compartment specific indexed PCR primer (referred to as P7), a universal PCR primer (referred to as P5), and a polymerase, and performing PCR amplification of the double indexed DNA molecules to generate multi-indexed DNA molecules.

[0122] In one embodiment, the sorting in steps (d) and (g) is performed using FACS sorting gated for fluorophore and DAPI positive nuclei.

[0123] In one embodiment, the compartments of the first plurality of compartments comprise from about 250 to 500 nuclei or cells.

[0124] In one embodiment, the compartments of the second plurality of compartments comprise about 25 nuclei or cells.

[0125] In one embodiment, the method further comprises pooling and collecting the multi-indexed nucleic acids, thereby producing a sequencing library from the plurality of nuclei or cells.

### BRIEF DESCRIPTION OF THE DRAWINGS

[0126] The following detailed description of embodiments of the invention will be better understood when read in conjunction with the appended drawings. It should be understood that the invention is not limited to the precise arrangements and instrumentalities of the embodiments shown in the drawings.

[0127] FIG. 1a through FIG. 1k depict data demonstrating that EasySci enables high-throughput and low-cost single-cell transcriptome and chromatin accessibility profiling across the entire mammalian brain. FIG. 1a-b: EasySci-RNA workflow. Key steps are outlined in the texts. FIG. 1b: Pie chart showing the estimated cost compositions of library preparation for profiling 1 million single-cell transcriptomes using EasySci-RNA. FIG. 1c: Density plot showing the gene body coverage comparing single-cell transcriptome profiling using 10× genomics and EasySci-RNA. Reads from indexed oligo-dT priming and random hexamers priming are plotted separately for EasySci-RNA. FIG. 1d: Barplot showing the number of unique transcripts detected per cell comparing 10× genomics and an EasySci-RNA library at similar sequencing depth (˜20,000 raw reads/cell). FIG. 1e: Experiment scheme to reconstruct a brain cell atlas of both gene expression and chromatin accessibility across different ages, sexes, and genotypes. FIG. 1f: Barplot showing the cell-type-specific proportion in the brain cell population profiled by EasySci-RNA. FIG. 1g: UMAP visualization of mouse brain cells from single-cell transcriptome (Top) and chromatin accessibility (Bottom) analysis, colored by main cell types in (FIG. 1f). FIG. 1h: Heatmap showing the aggregated gene expression (Top) and gene body accessibility (Bottom) of the top ten marker genes (columns) in each main cell type (rows). For both RNA-seq and ATAC-seq, unique reads overlapping with the gene bodies of cell-type-specific markers were aggregated, normalized first by library size and then by the maximum expression or accessibility across all cell types. FIG. 1i: Scatter plot showing the fraction of each cell type in the global brain population by single-cell transcriptome (x-axis) or chromatin accessibility analysis (y-axis) in EasySci. FIG. 1j-k: Mouse brain sagittal (FIG. 1j) and coronal (FIG. 1k) sections showing the H&E staining (Left) and the localizations of main neuron types through NNLS-based integration (Right), colored by main cell types in (FIG. 1f). The numbers correspond to cell-type-specific cluster-ID in (FIG. 1f).

[0128] FIG. 2 depicts a summary of key optimizations of EasySci-RNA compared to published single-cell RNA-seq by combinatorial indexing (sci-RNA-seq3 (Cao et al., Nature 566, 496-502 (2019)).

[0129] FIG. 3a through FIG. 3n depict representative examples showing the performance of optimized conditions of EasySci-RNA. FIG. 3a-b: Boxplots showing the number of unique transcripts detected per nucleus in different lysis conditions: 1% DEPC vs. no DEPC in lysis buffer (FIG. 3a); EZ lysis buffer vs. nuclei lysis buffer used in the published sci-RNA-seq3 (Cao et al., Nature 566, 496-502 (2019) (FIG. 3b). FIG. 3c-d: Boxplot showing the number of unique transcripts detected per nucleus across different fixation conditions: formaldehyde vs. paraformaldehyde (FIG. 3c); 0.1% formaldehyde vs. 1% formaldehyde (FIG. 3d). FIG. 3e-f: Two conditions were compared for preserving the fixed nuclei. The slow freezing condition (in 10% DMSO) outperformed the flash freezing condition in sci-RNA-seq3 (Cao et al., Nature 566, 496-502 (2019) by increasing the number of nuclei recovered in the experiment (FIG. 3e) and the number of unique transcripts detected per nucleus (FIG. 3f). FIG. 3g-h: Maxima reverse transcriptase greatly reduces the enzyme cost (FIG. 3g) without affecting the number of transcripts detected per nucleus (FIG. 3h). FIG. 3i-j: Both short oligo-dT and random primers were included in reverse transcription to increase the number of unique transcripts (FIG. 3i) and genes (FIG. 3j) detected per nucleus. FIG. 3k: EasySci-RNA used T4 ligase instead of quick ligase for a higher recovery rate of nuclei. FIG. 3l: Chemically modified ligation primers were used in EasySci, which greatly reduced primer dimers in the following PCR reaction and slightly increased the number of unique transcripts detected per nucleus. FIG. 3m: Additional cDNA purification step after second strand synthesis increased the number of unique transcripts per nucleus. FIG. 3n: The efficiency of the novel EasySci-RNA method was compared with the sci-RNA-seq3 using mouse brain nuclei. The raw data was subset to 4448 reads/cell to remove any potential bias from sequencing depth.

[0130] FIG. 4a through FIG. 4c depict representative examples showing the performance of optimized conditions of EasySci-ATAC. Two fixation conditions were compared: nuclei were either fixed with 1% formaldehyde for 10 minutes at room temperature or directly used for tagmentation without fixation. The unfixed condition outperformed the fixed condition by increasing cell recovery (FIG. 4a), the number of reads (FIG. 4b) and the ratio of reads in promoters (FIG. 4c) per nucleus.

[0131] FIG. 5a through FIG. 5f depict data demonstrating the performance of EasySci-RNA and EasySci-ATAC profiling of mouse brain samples. FIG. 5a-b: Scatter plots showing the number of single-cell transcriptomes (FIG. 5a) and single-cell chromatin accessibility (FIG. 5b) profiled in each mouse individual across five conditions, colored by sex. Of note, the number of cells recovered from two mouse individuals in the EOAD model (RNA) are very close and cannot be separated in the plot. FIG. 5c-d: Boxplots showing the number of unique transcripts (FIG. 5c) and genes (FIG. 5d) detected per nucleus in each condition profiled by EasySci-RNA. FIG. 5e-f: Boxplots showing the number of unique fragments (FIG. 5e) and the ratio of reads in promoters (FIG. 5f) per cell in each condition profiled by EasySci-ATAC.

[0132] FIG. 6a through FIG. 6b depict data demonstrating identification of main brain cell types and cell-type-specific markers by EasySci-RNA. FIG. 6a: Dot plot showing the number of single-cell transcriptomes recovered from each individual, colored by conditions. FIG. 6b: UMAP plots showing the gene expression of identified novel markers for Microglia (Arhgap45, Wdfy4), Astrocytes (Clerr, Adamts9), and Oligodendrocytes (Sec14l5, Galnt5). UMI counts for these genes are scaled by the library size, log-transformed, and then mapped to Z scores.

[0133] FIG. 7a through FIG. 7c depict data demonstrating identification of cell-type-specific isoforms in the mouse brain. FIG. 7a: RandomN primed EasySci-RNA reads from each main cell type were aggregated in every mouse individual, yielding 617 pseudocells. The tSNE plot showed the separation of main cell types by isoform expression. FIG. 7b: Violin plots showing the expression of gene App and isoform App-202 across main cell types. FIG. 7c: Violin plots showing the expression of gene Aplp2 and isoform Aplp2-209 across main cell types. White circles represent the normalized expression of genes and isoforms (log(1+TPM)). White bars represent standard deviation.

[0134] FIG. 8a through FIG. 8d depict data demonstrating the characterization of cell-type-specific chromatin accessibility and key TF regulators using EasySci-ATAC. FIG. 8a: UMAP plot of the EasySci-ATAC dataset subsampled to 5,000 cells per cell type (or all cells if the number of cells is less than 5,000), colored by main cell types in FIG. 1g. The analysis was performed using the peak-count matrix without integration with RNA-seq dataset. FIG. 8b: Barplot showing the number of cell-type-specific peaks for each main cell type (defined as differential accessible sites across main cell types with q-value<0.05 and TPM>20 in the target cell type). FIG. 8c: Heatmap showing the aggregated accessibility of top 100 DA peaks per cell type (ranked by fold change between the maximum and the second accessible cell type). Unique counts for cell-type-specific peaks are first aggregated, normalized by the library size, and then mapped to Z-scores. FIG. 8d: Scatter plots showing the correlation between gene expression and motif accessibility of cell-type specific TF regulators, together with a linear regression line. TF gene expressions are calculated by aggregating scRNA-seq gene counts for each main cluster, normalized by the library size, and then mapped to Z-scores. TF motif accessibilities are quantified by chromVar (Schep et al., Nat. Methods 14, 975-978 (2017)), then aggregated per main cell type and mapped to Z-scores.

[0135] FIG. 9a through FIG. 9j depict data demonstrating the identification and characterization of cell sub-clusters of the mouse brain. FIG. 9a: Schematic plot showing the computational framework for identifying and characterizing cell sub-clusters. Each main cell type was subjected to sub-clustering analysis based on both gene and exon expression. Genes were then clustered into gene modules based on their expression pattern across all sub-clusters. Further, the spatial location of rare cell types was mapped through spatial transcriptomic analysis. FIG. 9b: By sub-clustering analysis, a total of 362 sub-clusters across 31 main cell types was identified. The barplot (Left) shows the number of sub-clusters for each main cell type. The dot plot (Right) shows the number of cells from each sub-cluster. The two smallest sub-clusters (choroid plexus epithelial cells-7 and vascular leptomeningeal cells-2) are circled out. FIG. 9c: UMAP visualizations showing sub-clustering analysis for choroid plexus epithelial cells (Top) and vascular leptomeningeal cells (Bottom) colored by sub-cluster IDs, highlighting two rare sub-clusters shown in (FIG. 9b). FIG. 9d: Dot plot showing the expression of selected marker genes for choroid plexus epithelial cells_7 (Top) and vascular leptomeningeal cells_2 (Bottom), including both normal genes (Left five genes) and transcription factors (Right five genes). FIG. 9e: UMAP visualizations of genes colored by identified gene module IDs. FIG. 9f: Scatterplots showing examples of gene modules and their expression levels across sub-clusters (ordered by gene module expression): GM-11 is specific to ependymal cells; GM-9 is specific to pituitary cell-6 (corticotropic cells); GM-6 marks four proliferating sub-clusters from different main cell types. FIG. 9g: UMAP visualization showing four proliferating sub-clusters identified from OB neurons 1, astrocytes, oligodendrocyte progenitor cells, and microglia, colored by the normalized expression of canonical proliferating marker Mki67 (Top) and the aggregated expression of lncRNAs in GM-6 (Bottom). UMI counts are first normalized by library size, log-transformed, aggregated (for multiple genes), and then mapped to Z-scores. FIG. 9h-i: Plots showing the normalized expression of gene modules in spatial transcriptomic datasets profiling mouse sagittal (Left) and coronal (Right) sections: GM-11, specific to ependymal cells, was mapped along all brain ventricles (FIG. 9h); GM-6, specific to proliferating cells, was mapped to proliferation active areas including subventricular zone (FIG. 9i). FIG. 9J: Similar to (FIG. 9h), plots showing the normalized expression of gene modules in spatial transcriptomic dataset profiling a mouse coronal section. UMI counts for genes from each gene module are scaled for library size, log-transformed, aggregated, and then mapped to Z scores.

[0136] FIG. 10a through FIG. 10c depict data characterizing microglia subtypes incorporating both gene and exon level expression. FIG. 10a-b: UMAP analysis of microglia cells was performed based on gene expression alone (FIG. 10a), or both gene and exon level expression (FIG. 10b). Cells are colored by sub-cluster ID from Louvain clustering analysis with combined gene and exon level information. Several sub-clusters cannot be separated from each other in the UMAP space by gene expression alone. FIG. 10c: UMAP plots same as (FIG. 10a) and (FIG. 10b), showing the expression of an exonic marker Ttr-ENSMUSE00000477272.5 of microglia sub-cluster 13. Microglia-13 can be better separated when combining both gene and exon level information. FIG. 10d: UMAP plots same as (FIG. 10b), showing the specific expression of an example exon marker Map2-ENSMUSE00000443205.3 (left) of microglia sub-cluster 8 and the lack of specificity of its corresponding gene Map2 (right). Single-cell gene expression was normalized first by library size, log-transformed, and then scaled to Z-scores.

[0137] FIG. 11a through FIG. 11b depict exemplary characteristics of subclusters. FIG. 11a: Density plot showing the number of individuals per subcluster. The rug plot below the density plot represents the individual subclusters. FIG. 11b: Density plot of the number of marker exons per subcluster. The rug plot below the density plot represents the individual subclusters.

[0138] FIG. 12 depicts the characterization of cell types/subtypes by gene module expression. Scatter plot showing the expression of each gene module across 362 sub-clusters. The associated cell types were annotated on the plot. UMI counts for genes from each gene module are scaled for library size, log-transformed, aggregated, and then mapped to Z scores.

[0139] FIG. 13a through FIG. 13h depict data identifying brain cell population changes across the lifespan at sub-cluster resolution. FIG. 13a: Dot plots showing the cell-type-specific fraction changes (i.e., log-transformed fold change) of main cell types and sub-clusters in the early growth stage (adult vs. young, left plot) and the aging process (aged vs. adult, right plot) in EasySci-RNA data. Differential abundant sub-clusters were colored by the direction of changes. Representative sub-clusters were labeled along with top gene markers. FIG. 13b: Scatter plots showing the correlation of the sub-cluster specific fraction changes between males and females in the early growth stage (top) and the aging stage (bottom), with a linear regression line. The most significantly changed sub-clusters are annotated on the plots. FIG. 13c: Examples of development- or aging-associated subclusters are highlighted in (FIG. 13a) and their spatial positions. Left: scatterplots showing the aggregated expression of sub-cluster-specific marker genes across all sub-clusters. Right: plots showing the aggregated expression of sub-cluster-specific marker genes across a brain sagittal section in 10× Visium spatial transcriptomics data. UMI counts for gene markers are scaled for library size, log-transformed, aggregated, and then mapped to Z scores. FIG. 13d: Line plots showing the relative fractions of depleted subclusters across three age groups identified from EasySci-RNA (left) and EasySci-ATAC (right). FIG. 13e: Scatter plots showing the correlated gene expression and motif accessibility of transcription factors enriched in OB neurons 1-17 (Sox2 and E2F2, left and middle) and oligodendrocytes-7 (Stat3, right), together with a linear regression line. FIG. 13f: Box plots showing the fractions of the reactive microglia (left) and reactive oligodendrocytes (right) across three age groups profiled by EasySci-RNA (top) and EasySci-ATAC (bottom). FIG. 13g-h: Mouse brain coronal sections showing the expression level of C4b (FIG. 13g) and Serpina3 (FIG. 13h) in the adult (left) and aged (right) brains from spatial transcriptomics analysis.

[0140] FIG. 14a through FIG. 14d depict data demonstrating the identification of cell subtypes underlying olfactory bulb expansion from the young to adult stage in EasySci-RNA and EasySci-ATAC. FIG. 14a: Heatmaps showing the aggregated gene expression (top) and gene body accessibility (bottom) of sub-cluster specific gene markers (columns) in OB expansion-associated sub-clusters (rows) from OB neurons 1 (left), OB neurons 2 (middle), and OB neurons 3 (right). UMI counts for genes or reads overlapping with gene bodies were aggregated for each sub-cluster, normalized first by the total number of reads, column centered, and scaled across all cell sub-clusters. FIG. 14b-c: UMAP visualization showing astrocytes subtype 14 (FIG. 14b) and vascular leptomeningeal cells (VLC) subtype 14 (FIG. 14c), colored by subcluster ID in EasySci-RNA (top left) and EasySci-ATAC (bottom left), the aggregated gene expression (top right) and gene body accessibility (bottom right) of sub-cluster specific gene markers. FIG. 14d: For the OB expansion-related sub-clusters, their log 2-transformed fold changes were plotted between each age group and the young mice, profiled by EasySci-RNA (left) and EasySci-ATAC (right).

[0141] FIG. 15a through FIG. 15d depict data demonstrating identification of reduced endothelial cells in the aged brain by spatial transcriptomics. FIG. 15a: Boxplot showing the aggregated expression of endothelial marker genes across single cells recovered from adult and aged brains. The top ten gene markers of endothelial cells (FDR of 5%, ordered by q-value in differentiation gene analysis) were first selected. Next, three gene markers that significantly changed in aging (FDR of 5%) were filtered out. The remaining seven genes were combined as the gene module for marking endothelial cells in adult and aged brains: Rgs5, Nostrin, Ly6c1, Zfp366, Abcc9, Emen, Ptprb, Adgrl4, Flt1, Slc38a11. UMI counts for these genes are scaled for library size, log-transformed, aggregated, and then mapped to Z scores. FIG. 15b: UMAP visualization of all spatial spots from spatial transcriptomic analysis of adult, aged and 5×FAD brains, colored by conditions (left) or spatial clusters (right). FIG. 15c: Plots showing the mouse brain coronal sections (left) and the distribution of identified spatial clusters (right) in spatial transcriptomic datasets profiling adult (top) and aged (bottom) brains. FIG. 15d: Boxplots showing the expression of endothelial markers across all spatial spots (left) and across spatial spots within each spatial cluster (right) between adult and aged brains.

[0142] FIG. 16a through FIG. 16d depict data identifying aging-associated sub-clusters related to neurogenesis, oligodendrogenesis, and inflammation in EasySci-ATAC. FIG. 16a: UMAP visualization showing OB neurons 1-11 and OB neurons 1-17 identified from EasySci-RNA (top) and EasySci-ATAC (bottom), colored by subcluster id (left), aggregated gene expression or gene activity of OB neurons 1-11 gene markers (middle) and OB neurons 1-17 gene markers (right). FIG. 16b: UMAP visualization showing oligodendrocytes-6 and oligodendrocytes-7 identified from EasySci-RNA (top) and EasySci-ATAC (bottom), colored by subcluster id (left), aggregated gene expression or gene activity of oligodendrocytes-6 gene markers (middle) and oligodendrocytes-7 markers (right). FIG. 16 c: UMAP visualization showing microglia-9 identified from EasySci-RNA (top) and EasySci-ATAC (bottom), colored by subcluster id (left), aggregated gene expression or gene activity of microglia-9 gene markers (right). Subcluster marker genes were identified by differential expression analysis using scRNA-seq data. FIG. 16d: Heatmap showing the gene expression (top) and the promoter accessibility (bottom) of microglia-9 enriched genes across subclusters. The scRNA-seq data (UMI count matrix) and scATAC-seq data (read count matrix) were aggregated per sub-cluster, normalized by the total number of reads, column centered, and scaled.

[0143] FIG. 17a and FIG. 17b depict data demonstrating the identification of aging-associated gene expression changes across sub-clusters. FIG. 17a: Volcano plot showing the differentially expressed genes between aged and adult brains in all subclusters (left), colored by grey (not significant) or main cell types. FIG. 17b: The plots highlight several aging-associated gene markers, colored by main cell types.

[0144] FIG. 18a through FIG. 18l depict data identifying AD pathogenesis-associated gene expression signatures and cell subtypes. FIG. 18a: Volcano plots showing the differentially expressed (DE) genes between WT and EOAD model (top) or LOAD model (bottom) across all sub-clusters. Significantly changed genes are colored by the main cell type identity for the corresponding sub-cluster. FIG. 18b-c: Volcano plot same as (FIG. 18a), highlighting example DE genes with concordant changes across multiple sub-clusters comparing WT and EOAD (FIG. 18b) or LOAD (FIG. 18c) models, labeled with related biological pathways. FIG. 18d: Scatterplot showing the correlation of the number of DE genes identified in each sub-cluster between EOAD and LOAD, together with a linear regression line. FIG. 18e: 558 DE genes significantly changed within the same sub-cluster in both AD models (both compared with the wild-type). The scatterplot shows the correlation of the log 2-transformed fold changes of these 559 shared DE genes in EOAD model (x-axis) and LOAD model (y-axis). FIG. 18f: Dot plots showing the log-transformed fold changes of main cell types and sub-clusters comparing EOAD vs. WT (left) and LOAD vs. WT (right). Differential abundant sub-clusters were colored by the direction of changes. Representative sub-clusters were labeled along with top gene markers. FIG. 18g: Scatter plots showing the correlation of the log-transformed fold changes of sub-clusters (top: EOAD vs. WT, bottom: LOAD vs. WT) between male and female. FIG. 18h: Scatter plot showing the correlation of the log-transformed fold changes of sub-clusters in two AD models (both compared with the wild-type). Only sub-clusters showing significant changes in at least one AD model are included. FIG. 18i: Scatterplots showing the aggregated expression of gene markers of two cell subtypes (top: choroid plexus epithelial cells-4; bottom: the interbrain and midbrain neurons 1-4) across all sub-clusters from EasySci-RNA data. FIG. 18j: Brain coronal sections showing the spatial expression of subtype-specific gene markers of two subtypes (top: choroid plexus epithelial cells-4; bottom: the interbrain and midbrain neurons 1-4) in the WT and EOAD (5×FAD) brains in 10× Visium spatial transcriptomics data. FIG. 18k: Box plots showing the fraction of microglia-9 cells across different conditions profiled by EasySci-RNA (left) or EasySci-ATAC (right). FIG. 18l: Scatter plot showing the correlated gene expression and motif accessibility of four transcription factors (Nfe2l2, Nfkb1, Relb, and Srebf2) enriched in microglia-9, together with a linear regression line.

[0145] FIG. 19 depicts an agarose E-Gel quantification of the library concentration. Column M: 50 base pair ladder. Column 1: PCR product for the first 96-well plate, no purifications. Column 2: One 0.8× beads purification, plate one. Column 3: 0.8× purification and 0.9× purification, plate one. Column 4: PCR product for the second 96-well plate, no purifications. Column 5: One 0.8× beads purification, plate two. Column 6:0.8× purification and 0.9× purification, plate two.

[0146] FIG. 20a and FIG. 20f depict data demonstrating TrackerSci enables single-cell transcriptome and chromatin accessibility profiling of rare proliferating cells in the mammalian brain. FIG. 20a: TrackerSci workflow and experiment scheme. Key steps are outlined in the text. FIG. 20b-c: UMAP visualization of mouse brain cells, integrating the single-cell transcriptome and chromatin accessibility profiles of EdU+ cells and DAPI singlets (representing the global brain cell population). Cells are colored by sources (FIG. 20b, top), molecular layers (FIG. 20b, bottom), and main cell types (FIG. 20c). The identified neurogenesis and oligodendrogenesis trajectories are both annotated in (c). FIG. 20d: Pie plots showing the proportion of main cell types identified in the global cell population (left) and the enriched EdU+ cell population (right). FIG. 20e: Scatter plot showing the fraction of each cell type in the enriched EdU+ cell population by single-cell transcriptome (x-axis) or chromatin accessibility analysis (y-axis) in TrackerSci. FIG. 20f: The TrackerSci dataset, including both EdU+ cells and DAPI singlets, was integrated with a large-scale brain cell atlas comprising 1,469,111 cells. For the brain cell atlas, 5,000 cells of each cell type were sampled for the integration analysis. The UMAP plots show the integrated cells, colored by assay types (left, cell types from TrackerSci are annotated) or cell annotations from the brain cell atlas (right, cells from TrackerSci are colored in grey).

[0147] FIG. 21a and FIG. 21b depict data demonstrating that TrackerSci relies on two rounds of sorting to enrich and purify rare EdU+ proliferating cells in mammalian brains. FIG. 21a: Representative Fluorescent-activated cell sorting (FACS) scatter plots showing the percentage of EdU+ cells in mouse brains across different conditions during the first round of sorting. FIG. 21b: FACS scatter plot (left) and contour plot (right) showing the percentage of EdU+ cells during the second round of sorting in TrackerSci.

[0148] FIG. 22a through FIG. 22e depict the quality control of TrackerSci for single-cell transcriptome profiling. FIG. 22a: Boxplot showing the number of unique transcripts detected per cell (HEK293T nuclei) after different treatment conditions of click-chemistry (CC). The result indicated copper and reaction addictive in the conventional click-chemistry reaction decreased the scRNA-seq efficiency. FIG. 22b: Boxplot showing the number of unique transcripts detected per cell (mouse brain nuclei) across three conditions: no click-chemistry (No CC), conventional click-chemistry (CC), and click-chemistry plus condition (with picolyl azide dye and copper protectant, CC Plus). FIG. 22c: Scatter plots showing the number of unique human and mouse transcripts detected per cell across different conditions (with/without EdU labeling, with/without click chemistry plus reaction). FIG. 22d: Boxplot showing the number of unique transcripts (top) and genes (bottom) detected per cell in HEK293T and NIH/3T3 nuclei across the four conditions described in (FIG. 22c). FIG. 22e: Scatter plot showing the correlation between log-transformed aggregated gene expression profiled by TrackerSci and sci-RNA-seq in HEK293T cells (left) and mouse brain cells (right), together with the linear regression line (blue).

[0149] FIG. 23a through FIG. 23e depict the quality control of TrackerSci for single-cell chromatin accessibility profiling. FIG. 23a: Scatter plots showing the number of unique human and mouse ATAC-seq fragments detected per cell across different conditions (with/without EdU labeling, with/without click chemistry plus reaction). FIG. 23b: The aggregated fragment length distribution in ATAC-seq from TrackerSci of all cells across the four conditions described in FIG. 23a. FIG. 23c-d: Boxplots showing the number of unique ATAC-seq reads (Top) and the fraction of reads in promoters (Bottom) in HEK293T and NIH/3T3 nuclei (FIG. 23c) and mouse brain nuclei (FIG. 23d). FIG. 23e: Scatter plot showing the correlation between log-transformed aggregated ATAC-seq fragments (tags per million) profiled by TrackerSci and sci-ATAC-seq in HEK293T cells (top) and mouse brain cells (bottom), together with the linear regression line (blue). CC: click-chemistry. CC plus: click-chemistry plus condition (with picolyl azide dye and copper protectant).

[0150] FIG. 24 depicts data demonstrating increased expression of C4b in oligodendrocyte progenitor cells. Barplots showing the gene expression (left) and promoter accessibility (middle) of C4b from the TrackerSci dataset, and the gene expression of C4b from the EasySci dataset (right) in Oligodendrocytes progenitor cells (OPC) and committed oligodendrocyte precursors (COP), quantified by transcripts per million (TPM) for gene expression and reads per million for promoter accessibility. Error bars represent standard errors of the means.

[0151] FIG. 25a through FIG. 25e depict data demonstrating that TrackerSci recovered single-cell transcriptomes of rare newborn cells in the mammalian brain. FIG. 25a: Scatter plots showing the number of single-cell transcriptomes profiled in each mouse individual across four conditions, colored by sexes. Only mice from the main experiment group (EdU labeling for 5 days) are shown. FIG. 25b: Boxplot showing the log-transformed number of unique transcripts (left) and genes (right) detected per cell profiled by TrackerSci and the DAPI singlet (without enrichment of EdU+ cells, adult mouse brain). FIG. 25c-d: UMAP visualization of single-cell transcriptomes, including EdU+ cells (profiled by TrackerSci) and all brain cells (without enrichment of EdU+ cells), colored by experiments (FIG. 25c, top), conditions (FIG. 25c, bottom), and main cell types (FIG. 25d). FIG. 25e: Scatter plots showing the correlation of cell-type-specific fractions between two replicates (with relatively high numbers of cells recovered) in each condition profiled by single-cell RNA-seq analysis of TrackerSci.

[0152] FIG. 26a through FIG. 26e depict data demonstrating that TrackerSci recovered single-cell chromatin accessibility of rare newborn cells in the mammalian brain. FIG. 26a: Scatter plot showing the number of single-cell chromatin accessibility profiled in mouse individuals across four conditions, colored by sexes. Only mice from the main experiment group (EdU labeling for 5 days) are shown. FIG. 26b: Boxplot showing the fraction of reads in promoters and peaks (left) and the log-transformed number of unique ATAC-seq reads (right) detected per cell across different conditions in TrackerSci and the DAPI singlet (adult mouse brain, without enrichment of EdU+ cells). FIG. 26c-d: UMAP visualization of single-cell chromatin accessibility profiles, including EdU+ cells (profiled by TrackerSci) and all brain cells (without enrichment of EdU+ cells), colored by experiments (c, top), conditions (c, bottom), and main cell types (FIG. 26d). FIG. 26e: Scatter plots showing the correlation of cell-type-specific fractions between two replicates (with relatively high numbers of cells recovered) in each condition profiled by single-cell ATAC-seq analysis of TrackerSci.

[0153] FIG. 27 depicts data demonstrating that the cell population distributions are correlated between single-cell transcriptome and chromatin accessibility profiling of newborn cells in the mouse brain. Scatter plot showing the fraction of each cell type in the enriched EdU+ cell population by single-cell transcriptome (x-axis) or chromatin accessibility analysis (y-axis) in TrackerSci across different conditions.

[0154] FIG. 28 depicts a UMAP visualization of the full brain atlas dataset (˜1.5 million cells) with the same parameter settings as in FIG. 20f. Neurogenesis and oligodendrogenesis-related cell types are separated into distinct clusters, while the “bridge” cells in the intermediate stages are missing.

[0155] FIG. 29a through FIG. 29g depict data identifying epigenetic elements and transcription factors associated with heterogeneous cellular states of newborn cells in the mouse brain. FIG. 29a: Heatmap showing the relative expression (top) and chromatin accessibility (bottom) of cell-type-specific genes across cell types. The UMI count matrix (gene expression) and read count matrix (ATAC-seq) were normalized by the library size and then log-transformed, column centered, and scaled. The resulting values clamped to [−2, 2]. FIG. 29b: Density plot showing the distribution of Pearson correlation coefficients between gene expression and the accessibility of promoter (colored in red) or nearby accessible elements (within ±500 kb of the promoter, colored in blue) across pseudo-cells. In addition, the background distribution of the Pearson correlation coefficient was plotted after permuting the accessibility of peaks across pseudo-cells. FIG. 29c: Density plot showing the distribution of Pearson correlation coefficients between TF expression and their motif accessibility across pseudo-cells. The background distribution was calculated after permuting the motif accessibility of TFs across pseudo-cells. FIG. 29d: Genome browser plot showing links between distal regulatory sites and genes for a neurogenesis marker (Dlx2, top) and an oligodendrogenesis marker (Olig2, bottom). FIG. 29e: UMAP plots showing the cell-type-specific expression (left), the accessibility of promoter (middle), and linked distal site (right) for genes Dlx2 (top) and Olig2 (bottom). The single-cell expression data (UMI count) and ATAC-seq data (read count) were normalized first by library size and then log-transformed, column centered, and scaled. FIG. 29f: Scatter plots showing the correlation between the scaled gene expression and motif accessibility across cell types for Dlx2 (top) and Olig2 (bottom), together with a linear regression line. (ASC: astrocytes, CBGR: cerebellum granule neurons, COP: committed oligodendrocytes precursors, DGNB: dentate gyrus neuroblasts, ERY: erythroblasts, MFO: myelin-forming oligodendrocytes, MG: microglia, NPC: neuronal progenitor cells, OBNB: olfactory bulb neuroblasts, OBIN: olfactory bulb inhibitory neurons, OPC: oligodendrocytes progenitor cells, VEC: vascular endothelial cells). FIG. 29g: Scatter plots showing the correlation between the scaled gene expression and motif accessibility of less-characterized TF regulators, together with a linear regression line.

[0156] FIG. 30 depicts data identifying canonical and novel gene markers of neuronal progenitors and oligodendrocyte precursors. Each scatter plot shows the correlation between expression and promoter accessibility of known (left two columns) or novel (right two columns) cell-type-specific gene markers, together with a linear regression line.

[0157] FIG. 31 depicts data demonstrating the low cell-type-specificity of certain canonical neurogenesis markers. UMAP plots showing the expression of canonical neurogenesis markers (Sox2 and Dcx) across different cell types. The single-cell expression data (UMI count) were normalized first by the total number of reads for each cell and then log-transformed, column centered, and scaled.

[0158] FIG. 32a through FIG. 32e depict data demonstrating linking cis-regulatory elements and their regulated genes. FIG. 32a: UMAP visualization of EdU+ cells in FIG. 20b, colored by k-means clustering ID. FIG. 32b: The left histogram shows the number of accessible sites per gene. The right histogram shows the distance distribution of accessible sites within 500 kb of genes. Both plots include all nearby accessible sites (colored in black) and the linked accessible sites (colored in red). FIG. 32c: Heatmap showing the cell-type-specific peak accessibility of four Dlx2 linked sites. Cell types are ordered by hierarchical clustering. FIG. 32d: Heatmap showing the cell-type-specific peak accessibility of ten Olig2 linked sites. Cell types are ordered by hierarchical clustering. FIG. 32e: Barplots showing the average expression, the accessibility of promoter and linked distal sites for neurogenesis marker Dlx2 across different cell types. Gene expression values for each cell type were quantified by transcripts per million (TPM). Site accessibilities for each cell were quantified by the number of reads per million. Error bars represent standard errors of the means.

[0159] FIG. 33 depicts data identifying key transcription factor regulators of the newborn cells. Each scatter plot shows the correlation between cell-type-specific gene expression and motif accessibility for known TF regulators, together with a linear regression line.

[0160] FIG. 34a through FIG. 34h depict data deciphering the impact of ageing on the proliferation status and differentiation dynamics of different cell types in the mammalian brain. FIG. 34a: Boxplot showing the fraction of EdU+ cells in the mouse brain after five days of EdU labeling. The plot includes data from both single-cell transcriptome and chromatin accessibility analysis in TrackerSci. FIG. 34b: With the single-cell RNA-seq or ATAC-seq data of TrackerSci, the cell-type-specific fractions were first calculated in each condition (i.e., young, adult, aged, and 5×FAD), multiplied by the fraction of EdU+ cells in the entire brain. Then, the fold changes of normalized cell-type-specific fractions were quantified between the aged and adult brains. The scatter plot shows the correlation of the log-transformed fold changes (aged vs. adult) between single-cell transcriptome and chromatin accessibility analysis in TrackerSci. FIG. 34c: Similar to the analysis in (b), the dot plot shows the log-transformed cell-type-specific fold changes between each condition and the adult brain. FIG. 34d: Area plot showing the cell-type-specific proportions in EdU+ cells over time. FIG. 34e: Cells corresponding to OB neurogenesis (top), oligodendrogenesis (middle), and microglia (bottom) were integrated in TrackerSci and brain cell atlas; the left UMAP plot shows the integrated cells, colored by cell type annotations in TrackerSci or grey (brain cell atlas). The two UMAP plots on the right show cells from the brain cell atlas or the EdU+ cells recovered by TrackerSci, colored by the expression of the neuronal progenitor marker Mki67 (top), the committed oligodendrocyte precursor cells marker Bmp4 (middle) and the ageing/AD-associated microglia marker Csf1 (bottom). FIG. 34f: Box plots showing the cell-type-specific fractions of neuronal progenitor cells (top), committed oligodendrocyte precursors (middle) and ageing/AD-associated microglia (bottom) across different conditions in the brain cell atlas (left) or newborn cells from TrackerSci (right). FIG. 34g: Schematic showing how to calculate the self-renewal potential and differentiation potential of progenitor cells. FIG. 34h: Left: Line plot showing the estimated self-renewal potential of neuronal progenitor cells over time. Right: Line plot showing the estimated differentiation potential of the newly generated oligodendrocyte progenitor cells across three age groups.

[0161] FIG. 35a through FIG. 35e depict data characterizing the impact of ageing on the transcriptional and epigenetic regulations of neurogenesis and oligodendrogenesis. FIG. 35a: UMAP plots showing the differentiation trajectory of the neurogenesis trajectory (top) and the oligodendrogenesis trajectory (bottom), colored by main cell types (left) or pseudotime (right). The differentiation trajectories are inferred by RNA velocity analysis (left) and annotated on the right plot. FIG. 35b: Heatmap showing the dynamics of gene expression and motif accessibility of cell-type-specific TFs across the pseudotime of neurogenesis (left) and oligodendrogenesis (right) trajectories. FIG. 35c: Contour plots showing the distribution of EdU+ cells from TrackerSci-RNA in the neurogenesis trajectory (top) and oligodendrogenesis trajectory (bottom) across conditions. The arrows point to the significantly reduced cell states in each trajectory. FIG. 35d: A neighborhood graph from Milo differential abundance analysis on the neurogenesis trajectory (top) and oligodendrogenesis trajectory (bottom). The layout of the graph is determined by the position of the neighborhood index cell in FIG. 35a. Nodes represent cellular neighborhoods from the KNN graph. Differential abundance neighborhoods are colored by the log-transformed fold change across ages. Graph edges depict the number of cells shared between neighborhoods. FIG. 35e: The dot plots and heatmaps show the scaled gene expression and promoter accessibility of top differentially expressed genes in the neuronal progenitor cells (top) and oligodendrocyte progenitor cells (bottom).

[0162] FIG. 36 depicts data validating in vivo cell differentiation trajectory by a pulse-chase experiment. The mice brains were harvested one day, three days and nine days after EdU labeling (EdU was administered daily through i.p. injection during the first five days), followed by single-cell transcriptome analysis of EdU+ cells by TrackerSci. The contour plots show the distribution of EdU+ cells in the neurogenesis trajectory (left) and oligodendrogenesis trajectory (right) across conditions and the distribution of all brain cells without enrichment of EdU+ cells.

[0163] FIG. 37a through FIG. 37c depict data characterizing gene expression and chromatin accessibility dynamics along adult neurogenesis and oligodendrogenesis. FIG. 37a: Heatmap showing the dynamics of gene expression of 1,799 shared DE genes along DG neurogenesis (left) and OB neurogenesis (right). Genes are ordered and clustered by hierarchical clustering. Representative gene names (left) and enriched pathways (right) for each gene group are labeled. FIG. 37b: Heatmap showing examples TFs exhibiting trajectory-specific gene expression dynamics: Neurod1, Neurod2, Emx1, Stat3 and Rarb are uniquely upregulated in DG neurogenesis, while Dlx6, Ets1, Pbx1, Zfp711, Foxp2, Meis1 and Mef2c are uniquely upregulated in OB neurogenesis. FIG. 37c: Heatmap showing the dynamics of 8,443 DE genes (top) and 15,164 DA sites (bottom) along the oligodendrogenesis trajectory. Genes are ordered and clustered based on hierarchical clustering. Representative gene names (left) and enriched pathways (right) for each gene group are labeled. Peaks are ordered based on hierarchical clustering, and peaks corresponding to promoters of known and novel oligodendrogenesis markers are labeled.

[0164] FIG. 38 depicts an overview of ceramide/sphingomyelin metabolism. Sphingomyelin production from ceramide is catalyzed by sphingomyelin synthase and is hydrolyzed to ceramide by sphingomyelinase.

[0165] FIG. 39A through FIG. 39K depict data demonstrating that PerturbSci-Kinetics enables joint profiling of transcriptome dynamics and high-throughput gene perturbations by pooled CRISPR screens. FIG. 39A: Scheme of the experimental and computational strategy for PerturbSci-Kinetics. The dot plot on the upper right shows the number of cells profiled in this study compared to published single-cell metabolic profiling datasets. IAA, iodoacetamide. Asterisk, chemically modified 4sU. R, steady-state RNA level. α, mRNA synthesis rate. β, mRNA degradation rate. Exp, steady-state expression. Synth, synthesis rates. Deg, degradation rates. FIG. 39B: Barplot showing the estimated library preparation cost across different single-cell perturbation techniques. FIG. 39C: Scatter plot showing the number of unique sgRNA transcripts detected per cell in the experiment for profiling cells transduced with sgNTC or sgIGF1R. FIG. 39D: The left boxplot shows the normalized expression of dCas9-KRAB-MeCP2 in untreated and Dox-induced HEK293-idCas9 cells. The right boxplot shows the normalized expression of IGF1R in induced HEK293-idCas9 transduced with sgNTC/sgIGF1R. Gene counts of each single cell were normalized to a total of 1e4 to ease the batch effect caused by different sequencing depths across single cells, and were then log-transformed for visualization. FIG. 39E: Barplot showing normalized fractions of all possible single base mismatches in reads from sci-fate, PerturbSci-kinetics on unconverted cells, and PerturbSci-Kinetics on labeled converted cells. The single-base alignment information was retrieved from a subset of cells, and the strandness was considered. Then the normalized mismatch rates were calculated by dividing the counts of 12 mismatches by the total number of single bases aligned. FIG. 39F: Boxplot showing the fraction of recovered nascent reads in single-cell transcriptomes across conditions: no 4sU labeling+no chemical conversion, 4sU labeling+no chemical conversion, and 4sU labeling+chemical conversion. FIG. 39G: Boxplot comparing the ratio of reads mapped to exonic regions of the genome between nascent reads, pre-existing reads, and reads of whole transcriptomes of single cells. FIG. 39H-FIG. 39I: Barplots showing the significantly enriched Gene Ontology (GO) terms in analyzing the list of genes with low (FIG. 39H) or high (FIG. 39I) nascent reads ratio. FIG. 39J: Boxplot comparing the number of unique sgRNA transcripts detected per cell in cells with or without the chemical conversion. FIG. 39K: Stacked barplot showing the fraction of cells identified as sgNTC/sgIGF1R singlets, doublets, and cells without sgRNA detected in cells with or without chemical conversion.

[0166] FIG. 40A and FIG. 40B depict a scheme of plasmids and experiment procedures of PerturbSci. FIG. 40A: The vector system used in PerturbSci for sgRNA expression and CRISPRi. FIG. 40B: The library preparation scheme and the final library structures of PerturbSci.

[0167] FIG. 41A through FIG. 41L depict representative optimizations on sgRNA capture, sgRNA enrichment strategy, and fixation conditions. FIG. 41A: Multiple RT primers targeting different gRNA scaffold regions were included in the test experiment for targeted enrichment of gRNA. FIG. 41B: The enrichment efficiency of different RT primers was tested in PerturbSci with (Direct PCR) or without (sgRNA-only PCR) tagmentation (Scheme shown in FIG. 41B), analyzed by gel electrophoresis (FIG. 41C). As shown in c, gRNA primers 2 and 3 both yielded reasonable amplification signals following PCR, compared with other primers. FIG. 41D: Different purification conditions were tested for recovery of the gRNA library. Left lane: 0.7× Ampure beads purification post second strand synthesis+1.5× Ampure beads purification post PCR. Middle lane: 0.8× Ampure beads purification post second strand synthesis+1.2× Ampure beads purification post PCR. Right lane: 0.8× Ampure beads purification post second strand synthesis+gel purification post PCR. FIG. 41E: Gel Electrophoresis showing PCR products of the final libraries including sgRNA library (Lane 1) and the transcriptome library (Lane 2). FIG. 41F: Boxplot showing the number of unique sgRNA transcripts detected per cell with different sgRNA RT primer concentrations in both sgFto and sgNTC conditions. FIG. 41G: Boxplot showing the number of unique transcripts detected per cell with different sgRNA RT primer concentrations in both sgFto and sgNTC conditions. FIG. 41H: Boxplot showing normalized cell number with different sgRNA RT primer concentrations in both sgFto and sgNTC conditions. FIG. 41I: Boxplot showing sgRNA capture purity with different sgRNA RT primer concentrations. FIG. 41J: Boxplot showing the number of unique sgRNA transcripts detected with pooled or separated method in both sgFto and sgNTC conditions. FIG. 41K: Boxplot showing sgRNA capture purity with pooled or separated method. 1. Scatter plot showing the correlation between log-transformed aggregated gene expression profiled by PerturbSci and EasySci in a mouse 3T3-L1-CRISPRi cell line.

[0168] FIG. 42A through FIG. 42F depict representative optimizations on fixation conditions for chemical conversion and quality control on chemical conversion. FIG. 42A: Stacked barplot showing the fraction of cells identified as sgNTC, sgIGF1R, mixed, unmatched with different fixation conditions. FIG. 42B: Boxplot showing the number of unique sgRNA transcripts detected per cell with different fixation conditions. FIG. 42C: Boxplot showing the number of unique transcripts detected per cell with different fixation conditions. FIG. 42D: Dot plot showing the relative recovery rate of HEK293-idCas9 cells fixed in different fixation conditions after 0.05N HCl permeabilization step. FIG. 42E: Dot plot showing the relative recovery rate of HEK293-idCas9 cells fixed in different fixation conditions after chemical conversion. FIG. 42F: Boxplot showing the number of unique transcripts detected per cell in control and chemical conversion condition.

[0169] FIG. 43A and FIG. 43B depict data demonstrating strongly reduced IGF-1R mRNA and protein levels after Dox induction were further validated by FIG. 43A: RT-qPCR and FIG. 43B: flow cytometry.

[0170] FIG. 44A through FIG. 44Q depict data characterizing the impact of genetic perturbations on gene-specific transcriptional and degradation dynamics with PerturbSci-Kinetics. FIG. 44A: Scheme of the experimental design of the PerturbSci-Kinetics screen. The main steps are described in the text. FIG. 44B: UMAP visualization of genetic perturbations profiled by PerturbSci-Kinetics. Single-cell transcriptomes in each genetic perturbation were aggregated, followed by dimension reduction using PCA and UMAP. Population classes: the functional categories of genes targeted in different perturbations. FIG. 44C: The Scatter plot shows the correlation between perturbation-associated cell count (PerturbSci-Kinetics) and sgRNA read counts (bulk screen). FIG. 44D through FIG. 44F: Boxplot showing the log 2 transformed fold change of gene expression (FIG. 44D), synthesis rates (FIG. 44E), and degradation rate (FIG. 44F) of target genes across perturbations compared with the control sgRNA. FIG. 44G through FIG. 44J: Scatter plots showing the extent and the significance of changes on the distributions of global synthesis (FIG. 44G), degradation (FIG. 44H), nascent exonic reads ratio (FIG. 44I), and mitochondrial transcriptome turnover (FIG. 44J) upon perturbations compared with the control sgRNA. The effect size was calculated using the fold changes in the median value of detected genes between each perturbation and the control sgRNAs. FIG. 44K: Boxplot showing the proportion of degradation-regulated differentially expressed genes (DEGs) in all DEGs showing significant changes in synthesis/degradation rates across perturbations. FIG. 44L: Scatter plot showing the number of synthesis/degradation-regulated DEGs of different perturbations. nDEGs: the number of DEGs. FIG. 44M: Top20 perturbations ordered by the number of degradation-regulated DEGs. Synthesis only: DEGs with significant changes in synthesis rates. Degradation only, DEGs with significant changes in degradation rates. Synthesis+degradation, DEGs with significant changes in both synthesis and degradation rates. FIG. 44N and FIG. 44O: The overlap of DEGs with significantly enhanced synthesis (FIG. 44N) or impaired degradation (FIG. 44O) between DROSHA and DICER1. FIG. 44P: Line plot showing the Ago2 binding patterns on the transcript regions of protein-coding genes in FIG. 44N and FIG. 44O. The transcript regions of genes were assembled by merging all exons, and were divided into 5′ UTR, coding sequence (CDS) and 3′UTR based on coordinates of the 5′ most start codon and the 3′ most stop codon. Single-base coverage of Ago2 eCLIP on each gene was calculated, binned, and scaled to 0-1. After merging scaled binned coverage of genes in the same group together, the lowest coverage value in the CDS was used to scale the merged coverage again to visualize the Ago2/RISC binding pattern. FIG. 44P and FIG. 44Q: Heatmaps showing the expression, synthesis and degradation rates of regulated genes upon DROSHA and DICER1 knockdown. Tiles of each row were colored by fold changes of values in perturbations relative to NTC. *: q-value<0.05 and fold change>1.5. #: 0.05<q-value<0.1. +: fold change>1.5 but 0.05<=q-value<0.1 or q-value<0.05 but fold change<1.5.

[0171] FIG. 45A through FIG. 45C. FIG. 45A: Heatmap showing the overall Pearson correlations of normalized sgRNA read counts between the plasmid library and bulk screen replicates at different sampling times. For each library, read counts of sgRNAs were firstly normalized by the sum of total counts to remove the batch effects brought by the sequencing depth, and the second normalization was performed by dividing the normalized counts of sgRNAs with the sum of normalized counts of sgNTC. FIG. 45B: Boxplot showing the reproducible trends of deletion upon CRISPRi between the present study and a prior report²⁷. Log 2FC was calculated by dividing normalized counts of samples collected at the end of the screen with the normalized counts of samples collected at the start point. FIG. 45C: Barplot showing the different extent of deletion of cells receiving sgRNAs targeting genes in different categories. The knockdown on genes with higher essentiality caused stronger cell growth arrest.

[0172] FIG. 46A through FIG. 46E. FIG. 46A: The distribution of sgRNA counts in sgRNA-based singlets and doublets. Top1-3, sgRNA with the highest/second/third highest abundance in single cells. Others, sgRNAs detected other than ones with top abundance. FIG. 46B through FIG. 46E: Dotplots showing the expression decreases of target genes upon CRISPRi compared to NTC at the sgRNA level. Target genes were reversely ordered by the mean expression reduction at the gene level. Fold change<0.6 was used for sgRNA filtering, and target genes with 3, 2, 1, 0 on-target sgRNA were shown in b-e, respectively. FC, fold change.

[0173] FIG. 47: A substantial defect in both global mRNA synthesis and degradation for some genes.

[0174] FIG. 48: The transcriptionally perturbed nuclear genes exhibited a strong enrichment of ATF4 and CEBPG motifs around their promoters.

[0175] FIG. 49: The knockdown of two critical regulators in this pathway (i.e., DROSHA and DICER1^{41, 142}) resulted in significantly overlapped DEGs.

### DETAILED DESCRIPTION

[0176] This is a technology for selectively synthesizing multi-indexed nucleic acid libraries from a plurality of cells or nuclei. In some embodiments, the multi-indexed library comprises a multi-indexed RNA library. In some embodiments, the multi-indexed library comprises a multi-indexed sgRNA library. In some embodiments, the multi-indexed library comprises a multi-indexed transposase accessible chromatin (ATAC) library.

[0177] In some embodiments, the multi-indexed library comprises a double-indexed library. In some embodiments, the multi-indexed library comprises a triple-indexed library.

[0178] In some embodiments, the present invention relates to methods for generating a sequencing library from single cells that can be used to determine cell-type specific temporal dynamics. In some embodiments, the methods of the invention include a combination of Ethynyl-2-deoxyuridine (EdU) labeling of newborn cells with single-cell combinatorial indexing to profile the single-cell transcriptome and chromatin landscape of cells in vivo. In some embodiments, the methods of the invention allow for both transcriptome and chromatin accessibility profiling. In some embodiments, the methods allow for tracking cell-type-specific proliferation and differentiation dynamics across conditions, and for identification of genetic and epigenetic signatures associated with the alteration of cellular dynamics.

[0179] In some embodiments, the invention provides a technology for integrating CRISPR-based pooled genetic screens, highly scalable single-cell RNA-seq by combinatorial indexing, and metabolic labeling to recover single-cell transcriptome dynamics across hundreds of genetic perturbations. The methods presented allow for quantitative characterization of the genome-wide mRNA kinetic rates (e.g., synthesis and degradation rates) across hundreds of genetic perturbations in a single experiment.

### Definitions

[0180] Unless defined otherwise, all technical and scientific terms used herein have the same meaning as commonly understood by one of ordinary skill in the art to which this invention belongs. Although any methods and materials similar or equivalent to those described herein can be used in the practice or testing of the present invention, the preferred methods and materials are described.

[0181] As used herein, each of the following terms has the meaning associated with it in this section.

[0182] The articles “a” and “an” are used herein to refer to one or to more than one (i.e., to at least one) of the grammatical object of the article. By way of example, “an element” means one element or more than one element.

[0183] “About” as used herein when referring to a measurable value such as an amount, a temporal duration, and the like, is meant to encompass variations of ±20% or ±10%, more preferably ±5%, even more preferably ±1%, and still more preferably ±0.1% from the specified value, as such variations are appropriate to perform the disclosed methods.

[0184] The terms “cells” and “population of cells” are used interchangeably and generally refer to a plurality of cells, i.e., more than one cell. The population may be a pure population comprising one cell type. Alternatively, the population may comprise more than one cell type. In the present invention, there is no limit on the number of cell types that a cell population may comprise.

[0185] “Isolated” means altered or removed from the natural state. For example, a nucleic acid or a peptide naturally present in a living organism is not “isolated,” but the same nucleic acid or peptide partially or completely separated from the coexisting materials of its natural state is “isolated.” An isolated nucleic acid or protein can exist in substantially purified form, or can exist in a non-native environment such as, for example, a fixed nuclei.

[0186] The term “polynucleotide” as used herein is defined as a chain of nucleotides. Furthermore, nucleic acids are polymers of nucleotides. Thus, nucleic acids and polynucleotides as used herein are interchangeable. One skilled in the art has the general knowledge that nucleic acids are polynucleotides, which can be hydrolyzed into the monomeric “nucleotides.” The monomeric nucleotides can be hydrolyzed into nucleosides. As used herein polynucleotides include, but are not limited to, all nucleic acid sequences which are obtained by any means available in the art, including, without limitation, recombinant means, i.e., the cloning of nucleic acid sequences from a recombinant library or a cell genome, using ordinary cloning technology and PCR, and the like, and by synthetic means.

[0187] In the context of the present invention, the following abbreviations for the commonly occurring nucleic acid bases are used. “A” refers to adenosine, “C” refers to cytosine, “G” refers to guanosine, “T” refers to thymidine, and “U” refers to uridine.

[0188] Unless otherwise specified, a “nucleotide sequence encoding an amino acid sequence” includes all nucleotide sequences that are degenerate versions of each other and that encode the same amino acid sequence. The phrase nucleotide sequence that encodes a protein or an RNA may also include introns to the extent that the nucleotide sequence encoding the protein may in some version contain an intron(s).

[0189] As used herein, the terms “peptide,” “polypeptide,” and “protein” are used interchangeably, and refer to a compound comprised of amino acid residues covalently linked by peptide bonds. A protein or peptide must contain at least two amino acids, and no limitation is placed on the maximum number of amino acids that can comprise a protein's or peptide's sequence. Polypeptides include any peptide or protein comprising two or more amino acids joined to each other by peptide bonds. As used herein, the term refers to both short chains, which also commonly are referred to in the art as peptides, oligopeptides and oligomers, for example, and to longer chains, which generally are referred to in the art as proteins, of which there are many types. “Polypeptides” include, for example, biologically active fragments, substantially homologous polypeptides, oligopeptides, homodimers, heterodimers, variants of polypeptides, modified polypeptides, derivatives, analogs, fusion proteins, among others. The polypeptides include natural peptides, recombinant peptides, synthetic peptides, or a combination thereof.

[0190] As used herein, an “instructional material” includes a publication, a recording, a diagram, or any other medium of expression which can be used to communicate the usefulness of a compound, composition, vector, or delivery system of the invention in the kit for effecting alleviation of the various diseases or disorders recited herein. Optionally, or alternately, the instructional material can describe one or more methods of alleviating the diseases or disorders in a cell or a tissue of a mammal. The instructional material of the kit of the invention can, for example, be affixed to a container which contains the identified compound, composition, vector, or delivery system of the invention or be shipped together with a container which contains the identified compound, composition, vector, or delivery system. Alternatively, the instructional material can be shipped separately from the container with the intention that the instructional material and the compound be used cooperatively by the recipient. The term “microarray” refers broadly to both “DNA microarrays” and “DNA chip(s),” and encompasses all art-recognized solid supports, and all art-recognized methods for affixing nucleic acid molecules thereto or for synthesis of nucleic acids thereon.

[0191] Ranges: throughout this disclosure, various aspects of the invention can be presented in a range format. It should be understood that the description in range format is merely for convenience and brevity and should not be construed as an inflexible limitation on the scope of the invention. Accordingly, the description of a range should be considered to have specifically disclosed all the possible subranges as well as individual numerical values within that range. For example, description of a range such as from 1 to 6 should be considered to have specifically disclosed subranges such as from 1 to 3, from 1 to 4, from 1 to 5, from 2 to 4, from 2 to 6, from 3 to 6 etc., as well as individual numbers within that range, for example, 1, 2, 2.7, 3, 4, 5, 5.3, and 6. This applies regardless of the breadth of the range.

### Barcoded Polynucleotides

[0192] In some embodiments, the invention provides methods of generating multi-barcoded polynucleotide molecules.

[0193] In some embodiments, the methods relate to contacting a sample containing RNA molecules with at least one set of barcoded reverse transcription primers, performing reverse transcription to generate singly barcoded DNA molecules, and contacting the singly barcoded DNA molecules with a set of barcoded PCR primers, and performing PCR amplification to generate a set of double barcoded polynucleotides. In some embodiments, the number of unique double barcoded polynucleotides corresponds to the number of unique combinations of barcodes that can be generated. Therefore, in various embodiments, a set of double barcoded polynucleotides comprises 5 to 10⁹ unique double barcoded polynucleotides.

[0194] In some embodiments, the methods relate to contacting a sample containing nucleic acid molecules with at least one set of barcoded transposases, performing tagmentation to generate singly barcoded DNA molecules, and contacting the singly barcoded DNA molecules with a set of barcoded PCR primers, and performing PCR amplification to generate a set of double barcoded polynucleotides. In some embodiments, the number of unique double barcoded polynucleotides corresponds to the number of unique combinations of barcodes that can be generated. Therefore, in various embodiments, a set of double barcoded polynucleotides comprises 5 to 10⁹ unique double barcoded polynucleotides.

[0195] In some embodiments, the methods relate to contacting a sample containing RNA molecules with at least one set of barcoded reverse transcription primers, performing reverse transcription to generate singly barcoded DNA molecules, contacting the singly barcoded DNA molecules with at least one set of barcoded ligation oligonucleotides, ligating the barcoded ligation oligonucleotides to the nucleic acid molecules to generate double barcoded DNA molecules, and contacting the double barcoded DNA molecules a set of barcoded PCR primers, and performing PCR amplification to generate a set of triple barcoded polynucleotides. In some embodiments, the number of unique triple barcoded polynucleotides corresponds to the number of unique combinations of barcodes that can be generated. Therefore, in various embodiments, a set of triple barcoded polynucleotides comprises 5 to 10⁹ unique triple barcoded polynucleotides.

[0196] Non-limiting examples of barcode primer sets for generating multi-barcoded polynucleotides of the present disclosure are provided in Tables 3-7 and 11, however the invention is not limited to these specific barcode sets as any number of alternative unique barcodes can be incorporated into the barcoded polynucleotides to generate a multi-indexed library of barcoded polynucleotides.

[0197] In one exemplary embodiment, for use in 96 well plate format, a set of barcoded polynucleotides comprises at least unique 96 barcodes. Exemplary sets of unique barcodes include, but are not limited to, those set forth in Table 3, Table 4, Table 5 or Table 6.

[0198] A barcode sequence is a unique sequence that can be used to distinguish a barcoded polynucleotide in a biological sample from other barcoded polynucleotides in the same biological sample. The concept of “barcodes” and appending barcodes to nucleic acids and other proteinaceous and non-proteinaceous materials is known to one of ordinary skill in the art (see, e.g., Liszczak G et al. Angew Chem Int Ed Engl. 2019 Mar. 22; 58 (13): 4144-4162). Thus, it should be understood that the term “unique” is with respect to the molecules of a single biological sample and means “only one” of a particular molecule or subset of molecules of the sample.

[0199] The length of a barcode sequence may vary. For example, a barcode sequence may have a length of 5 to 50 nucleotides (e.g., 5 to 40, 5 to 30, 5 to 20, 5 to 10, 10 to 50, 10 to 40, 10 to 30, or 10 to 20 nucleotides). In some embodiments, a barcode sequence may have a length of 5, 10, 15, 20, 25, 30, 35, 40, 45, or 50 nucleotides.

[0200] In some embodiments, the methods comprise delivering to a biological tissue a first set of barcoded polynucleotides. A first set may include any number of barcoded polynucleotides. In some embodiments, a first set include 5 to 1000 barcoded polynucleotides. For example, a first set may comprise 5 to 900, 5 to 800, 5 to 700, 5 to 600, 5 to 500, 5 to 400, 5 to 300, 5 to 200, 5 100, 10 to 1000, 10 to 900, 10 to 800, 10 to 700, 10 to 600, 10 to 500, 10 to 400, 10 to 300, 10 to 200, 20 to 1000, 20 to 900, 20 to 800, 20 to 700, 20 to 600, 20 to 500, 20 to 400, 20 to 300, 20 to 200, 50 to 1000, 50 to 900, 50 to 800, 50 to 700, 50 to 600, 50 to 500, 50 to 400, 50 to 300, or 50 to 200 barcoded polynucleotides. More than 1000 barcoded polynucleotides in a first set are contemplated herein.

[0201] In some embodiments, the methods comprise delivering to the biological sample a second set of barcoded polynucleotides. A second set may include any number of barcoded polynucleotides. In some embodiments, a second set include 5 to 1000 barcoded polynucleotides. For example, a second set may comprise 5 to 900, 5 to 800, 5 to 700, 5 to 600, 5 to 500, 5 to 400, 5 to 300, 5 to 200, 5 100, 10 to 1000, 10 to 900, 10 to 800, 10 to 700, 10 to 600, 10 to 500, 10 to 400, 10 to 300, 10 to 200, 20 to 1000, 20 to 900, 20 to 800, 20 to 700, 20 to 600, 20 to 500, 20 to 400, 20 to 300, 20 to 200, 50 to 1000, 50 to 900, 50 to 800, 50 to 700, 50 to 600, 50 to 500, 50 to 400, 50 to 300, or 50 to 200 barcoded polynucleotides. More than 1000 barcoded polynucleotides in a second set are contemplated herein.

[0202] In some embodiments, the methods comprise delivering to the biological sample a third set of barcoded polynucleotides. A third set may include any number of barcoded polynucleotides. In some embodiments, a third set includes 5 to 1000 barcoded polynucleotides. For example, a third set may comprise 5 to 900, 5 to 800, 5 to 700, 5 to 600, 5 to 500, 5 to 400, 5 to 300, 5 to 200, 5 100, 10 to 1000, 10 to 900, 10 to 800, 10 to 700, 10 to 600, 10 to 500, 10 to 400, 10 to 300, 10 to 200, 20 to 1000, 20 to 900, 20 to 800, 20 to 700, 20 to 600, 20 to 500, 20 to 400, 20 to 300, 20 to 200, 50 to 1000, 50 to 900, 50 to 800, 50 to 700, 50 to 600, 50 to 500, 50 to 400, 50 to 300, or 50 to 200 barcoded polynucleotides. More than 1000 barcoded polynucleotides in a third set are contemplated herein.

[0203] In one embodiment, the invention provides a method of performing reverse transcription (RT) comprising contacting an RNA sample with a set of RT primers and a reverse transcriptase.

[0204] In some embodiments, the methods comprise joining barcoded polynucleotides of the first set to barcoded polynucleotides of the second set. In some embodiments, the methods comprise exposing the biological sample to a ligation reaction, thereby producing double barcoded polynucleotides, wherein the double barcoded polynucleotides comprises a unique combination of barcoded polynucleotides from the first set and the second set.

[0205] In one embodiment, the method of the invention incorporates a step of combining two polynucleotide sequences into a single nucleic acid molecule using “tagmentation.” As used herein, the term “tagmentation” refers to the modification of DNA by a transposome complex comprising transposase enzyme complexed with adaptors comprising transposon end sequence. Tagmentation results in the simultaneous fragmentation of the target DNA molecule and ligation of a polynucleotide sequence (e.g. an adaptor or linker) to the 5′ ends of both strands of duplex fragments. Following a purification step to remove the transposase enzyme, additional sequences (e.g., barcodes) can be added to the ends of the adapted fragments, for example by PCR, ligation, or any other suitable methodology known to those of skill in the art.

[0206] The method of the invention can use any transposase that can accept a transposase end sequence and fragment a target nucleic acid, attaching a transferred end, but not a non-transferred end. A “transposome” is comprised of at least a transposase enzyme and a transposase recognition site. In some such systems, termed “transposomes”, the transposase can form a functional complex with a transposon recognition site that is capable of catalyzing a transposition reaction. The transposase or integrase may bind to the transposase recognition site and insert the transposase recognition site into a target nucleic acid in a process sometimes termed “tagmentation”. In some such insertion events, one strand of the transposase recognition site may be transferred into the target nucleic acid.

[0207] Some embodiments can include the use of a barcoded Tn5 transposase to incorporate a barcode into DNA molecules for preparation of a multi-indexed library.

[0208] In some embodiments, the methods comprise performing PCR amplification of using a set of PCR primers comprising a set of barcoded polynucleotides.

[0209] In some embodiments the multi-indexed library of the invention comprises a multitude of indexed nucleic acid products comprising two or more barcodes, wherein the combination of the two or more barcodes comprises a unique combination of barcoded polynucleotides. In some embodiments, the unique combination is a unique combination of a first and second barcode. In some embodiments, the unique combination is a unique combination of a first, a second, and a third barcode.

### Phosphorothioate Adaptor

[0210] Also provided herein is an adaptor sequence, which may be a polynucleotide comprising phosphorothioate bonds between the nucleotides which makes it resistant to tagmentation. The purpose of the adaptor is to serve as a bridge to join barcoded polynucleotides from two different sets (e.g., to aid in ligation of single barcoded polynucleotides to the polynucleotides comprising the second barcode). The length of the phosphorothioate adaptor may vary. For example, a phosphorothioate adaptor may have a length of 10 to 100 nucleotides (e.g., 10 to 90, 10 to 80, 10 to 70, 10 to 60, 10 to 50, 10 to 40, 10 to 30, 10 to 20, 20 to 100, 20 to 90, 20 to 80, 20 to 70, 20 to 60, 20 to 50, 20 to 40, or 20 to 30 nucleotides). In some embodiments, a phosphorothioate adaptor may have a length of 10, 15, 20, 25, 30, 35, 40, 45, 50, 55, 60, 65, 70, 75, 80, 85, 90, 95, or 100 nucleotides. Longer phosphorothioate adaptors are contemplated herein.

[0211] In some embodiments, the phosphorothioate adaptor is added to a singly barcoded polynucleotide sample concurrently with or following the delivery of a second set of barcoded polynucleotides, although, in some embodiments, the phosphorothioate adaptor may be annealed to the second set of barcoded polynucleotides prior to delivery.

[0212] In one embodiment, the phosphorothioate adaptor comprises a 3′ end modification. Exemplary 3′ end modifications include, but are not limited to, 3′ddC, 3′ddT, 3′ddU, 3′ Inverted dT, 3′ C3 spacer, 3′ amino, 3′ rU oxidized by periodate, 3′ phosphorylation, 3′ fluoro, 3′aldehyde, 3′carboxylate, 3′ thiol, 3′O-methyl, 3′azido, 3′alkyne, 3′alkene, 3′ (CH2)n-X (X═H, OCH3, CH3, SH, NH2, OH, etc.; n≥1), and 3′ (CH2CH2O)n (n≥1). In one embodiment, the phosphorothioate adaptor comprises at least one chemical group that blocks the 3′ hydroxyl group. In one embodiment, the phosphorothioate adaptor comprises at least one modification that removes the 3′ hydroxyl group.

[0213] In some embodiments, the phosphorothioate adaptor sequence for use in the ligation reaction comprises 5′-A*G*A*T*C*G*G*A*A*G*A*G*C*G*T*C*G*T*G*T*A*G*G*G*A*A*A*G*A*G*T*G*T*/3ddC/(SEQ ID NO: 2445), wherein ‘*’ represents phosphorothioate bonds between nucleotides, which prevents the tagmentation of the oligo, and wherein ‘/3ddC/’ represents a dideoxycytidine modification, which prevents the extension of the oligo on the 3′ end by DNA polymerases.

### Sequencing

[0214] In some embodiments, the methods include a sequencing step. For example, next generation sequencing (NGS) methods (or other sequencing methods) may be used to sequence the triple barcoded polynucleotide libraries. In some embodiments, the methods comprise preparing an NGS library in vitro. Thus, in some embodiments, the methods comprise sequencing the library of barcoded nucleic acid molecules to produce sequencing reads. Sequencing methods are known, and an example protocol is provided herein.

### Triple Indexed RNA Library

[0215] In some embodiments, the present invention relates to a method for generating a triple-indexed RNA sequencing library. In one embodiment, the method comprises the steps of:
[0216] Distributing nuclei or cells to wells of a multi-well plate;
[0217] Reverse Transcription (RT) of RNA molecules using a set of two indexed RT primers to generate a cDNA library having a first index;
[0218] Pooling of the cDNA library and Redistribution of the cDNA library into wells of a multi-well plate;
[0219] Ligation of a second index sequence onto the cDNA library using an adaptor sequence to aid in ligation;
[0220] Pooling of the cDNA library and Redistribution of the cDNA library into wells of a multi-well plate;
[0221] Second strand synthesis of the cDNA library;
[0222] Purification;
[0223] Tagmentation; and
[0224] PCR amplification of the dsDNA library with indexed primers to generate a triple indexed sequencing library.

[0225] In some embodiments, sets of indexed primers are provided in Tables 3-6 of Example 2 and in Table 11 of Example 4.

[0226] Table 3 of Example 2 provides indexed short dT primers for use in reverse transcription (RT) to index mRNA molecules having a polyA tail.

[0227] Table 4 of Example 2 provides random RT primers to index total RNA molecules.

[0228] Table 11 of Example 4 provides sgRNA capture primers for use in capturing sgRNA molecules.

[0229] Table 5 of Example 2 provides indexed ligation primers for use in adding a second index to cDNA molecules in a ligation step in combination with a ligation adaptor sequence.

[0230] In some embodiments, the adaptor sequence for use in the ligation reaction comprises 5′-A*G*A*T*C*G*G*A*A*G*A*G*C*G*T*C*G*T*G*T*A*G*G*G*A*A*A*G*A*G*T*G*T*/3ddC/(SEQ ID NO: 2445), wherein ‘*’ represents phosphorothioate bonds between nucleotides, which prevents the tagmentation of the oligo, and wherein ‘/3ddC/’ represents a dideoxycytidine modification, which prevents the extension of the oligo on the 3′ end by DNA polymerases.

[0231] Table 6 of Example 2 provides a set of indexed P7 primer sequences for use in adding a third index to the library during PCR.

### Using Triple-Barcoded RNA Molecules

[0232] Any method that would benefit from massive parallel sequencing can utilize the triple barcode methodology of the present invention. In various embodiments, triple barcoded nucleic acid molecule libraries prepared for use in an assay such as RT-PCR, qRT-PCR, RNA-structure mapping (such as SHAPE-seq or SHAPE-MaP, DMS-seq), transcriptome profiling, in-cell sequencing, next-generation RNA sequencing (RNA-seq), nanopore sequencing, PacBio sequencing, zero-mode waveguide sequencing, cDNA library synthesis, cDNA synthesis, and a combination thereof.

[0233] In some embodiments, the triple barcode method of the invention is incorporated into methods for determining transcriptome and chromatin landscape changes in cells. In some embodiments, the triple barcode method of the invention is incorporated into methods to dissect the critical regulators of gene-specific transcription, splicing, and degradation in a massive-parallel manner.

### Cell-Type-Specific Temporal Dynamics

[0234] In some embodiments, the present invention relates to methods for generating an RNA or ATAC sequencing library from single cells that can be used to determine cell-type specific temporal dynamics. In some embodiments, the methods of the invention include a combination of Ethynyl-2-deoxyuridine (EdU) labeling of newborn cells with single-cell combinatorial indexing to profile the single-cell transcriptome and chromatin landscape of cells in vivo. In some embodiments, the methods of the invention allow for both transcriptome and chromatin accessibility profiling. In some embodiments, the methods allow for tracking cell-type-specific proliferation and differentiation dynamics across conditions, and for identification of genetic and epigenetic signatures associated with the alteration of cellular dynamics.

[0235] In some embodiments, the method comprises the following steps: (i) label a cell, tissue or sample with 5-Ethynyl-2-deoxyuridine (EdU), a thymidine analog that can be incorporated into replicating DNA for labeling in vivo cellular proliferation, (ii) nuclei are extracted, fixed, and then subjected to click chemistry-based in situ ligation to an azide-containing fluorophore, followed by fluorescence-activated cell sorting (FACS) to enrich the EdU+ cells, (iii) indexed reverse transcription or transposition is used to introduce the first round of indexing, cells from all wells are pooled and then redistributed into multiple 96-well plates through FACS sorting to further purify the EdU+ cells, (iv) library preparation proceeds using protocols for multi-barcoding of polynucleotides such that most cells pass through a unique combination of wells, such that their contents are marked by a unique combination of barcodes that can be used to group reads derived from the same cell. In some embodiments, the two sorting steps are essential for excluding contaminating cells and enriching extremely rare proliferating cell populations.

### TrackerSci-RNA

[0236] In some embodiments, the method comprises EdU staining nuclei using Click-iT Plus EdU Alexa Fluor™ 647 Flow Cytometry assay Kit. Then, nuclei are spun down, washed once with 1× Click-iT saponin-based permeabilization and wash reagent, resuspended, stained with 4′,6-diamidino-2-phenylindole (DAPI, Invitrogen D1306) and FACS sorted. Next, Alexa647 and DAPI positive nuclei are sorted into multi-well plates with each well containing about 250˜500 nuclei. Reverse transcription is then performed on the RNA molecules with a barcoded oligo-dT primer (5′-(SEQ ID NO: 2447) ACGACGCTCTTCCGATCTNNNNNNNN [10 bp-index] TTTTTTTTTTTTTTTTTTTTTTTTTTTTTTVN-3′ (SEQ ID NO:2448). Nuclei are then pooled, stained with DAPI, and sorted at 25 nuclei per well into a second set of multi-well plates. Cells are gated based on DAPI and Alexa647 such that singlets are discriminated from doublets and EdU+ cells are purified. Second strand synthesis is then performed and tagmentation is performed. After tagmentation, each well is mixed with P5 primer (5′-(SEQ ID NO:2415) AATGATACGGCGACCACCGAGATCTACA [15] CCCTACACGACGCTCTTCCGAT CT-3′ (SEQ ID NO:2416), IDT), and P7 primer (5′-(SEQ ID NO: 2417) CAAGCAGAAGACGGCATACGAGAT [17] GTCTCGTGGGCTCGG-3′ (SEQ ID NO: 2418)), and PCR amplification is carried out. After PCR, samples are pooled and purified. Following purification, the samples can be sequenced.

### TrackerSci-ATAC

[0237] In some embodiments, the method comprises EdU staining nuclei using Click-iT Plus EdU Alexa Fluor™ 647 Flow Cytometry assay Kit (Thermo Fisher Scientific, 10634), nuclei are spun down, permeabilized Click-iT saponin-based permeabilization and wash reagent, and FACS sorted. Alexa647 and DAPI positive nuclei were sorted into multi-well plates with each well containing about 250˜500 nuclei. Barcoded Tn5 is added and Tagmentation is performed. All nuclei are then pooled, stained with DAPI, and sorted into multi-sell plates with the gating based on DAPI and Alexa647 such that singlets are discriminated from doublets and EdU+ cells are purified. After sorting, reverse crosslinking is performed. Then, indexed P5 primer (5′-(SEQ ID NO: 2415)

[0238] AATGATACGGCGACCACCGAGATCTACA [15] CCCTACACGACGC TCTTCCGATCT-3′ (SEQ ID NO:2449)), and indexed P7 primer (5′-(SEQ ID NO:2419) CAAGCAGAAGACGGCATACGAGAT [17] GTGACTGGAGTTCAGACGTGTGCTCT TCCGATCT-3′ (SEQ ID NO:2420)) are added into each well and PCR amplification is carried out. Final PCR products are pooled and purified. The TrackerSci ATAC-seq library can then be sequenced.

sgRNA Libraries

[0239] In some embodiments, the present invention relates to methods for generating an RNA sequencing library from single cells that can be used to dissect the critical regulators of gene-specific transcription, splicing, and degradation in a massive-parallel manner.

[0240] In one embodiment, the method comprises the steps as outlined in FIG. 39A and FIG. 44A. In one embodiment, the methods include the development of a novel combinatorial indexing strategy (referred to as ‘PerturbSci’) which was developed for targeted enrichment and amplification of the sgRNA region that carries the same cellular barcode with the whole transcriptome (FIG. 39A). PerturbSci yields a high capture rate of sgRNA (i.e., over 97%), comparable to previous approaches for single-cell profiling of pooled CRISPR screens. Furthermore, the method builds on a method of single-cell RNA-seq by three-level combinatorial indexing (i.e., EasySci-RNA, which is described in detail in Examples 1 and 2 herein). PerturbSci substantially reduces library preparation costs for single-cell RNA profiling of pooled CRISPR screens. In some embodiments, a multimeric fusion protein dCas9-KRAB-MeCP212 (idCas9), a highly potent transcriptional repressor that outperforms conventional dCas9 repressors is used for performing the library preparation assay(s) of the invention. In some embodiments, PerturbSci is integrated with a 4-thiouridine (4sU) labeling method. The integrated method (i.e., PerturbSci-Kinetics) exhibits an order of magnitude higher throughput than the previous single-cell metabolic profiling approaches. Following 4sU labeling and thiol (SH)-linked alkylation reaction (referred to as ‘chemical conversion’), the nascent transcriptome and the whole transcriptome from the same cell can be distinguished by T to C conversion in reads mapping to mRNAs. The kinetic rate of mRNA dynamics (e.g., synthesis and degradation) are then calculated as a multi-layer readout for each genetic perturbation.

[0241] In one embodiment, the method of the invention can be used to dissect key regulators of transcriptome kinetics. In such an embodiment, a PerturbSci-Kinetics screen can be performed on idCas9 cells transduced with a library of sgRNAs, containing guides targeting genes involved in a variety of biological processes including mRNA transcription, processing, degradation, and others. In one embodiment, the cloning and lentiviral packaging are performed in a pooled fashion. In one embodiment, the idCas9 cell line is transfected with the sgRNA virus library at a low multiplicity of infection to ensure most cells received only one sgRNA. After a 5-day puromycin selection to remove cells receiving no sgRNA, a fraction of cells for bulk library preparation. In one embodiment, the rest of the cells are treated with Doxycycline (Dox) to induce the dCas9-KRAB-MeCP2 expression. After at least seven days for efficient gene knockdown, 4sU labeling is performed on the cells (for about two hours) and samples of the cells are harvested for both bulk and single-cell PerturbSci-Kinetics library preparation. In some embodiments, chemical conversion of the 4sU label occurs before library preparation.

[0242] In some embodiments, the screening method of the invention can be used to uniquely capture multiple layers of information, including, but not limited to gene-specific synthesis and degradation rate in each perturbation, splicing information, the kinetics of genes targeted by CRISPRi, the impact of diverse genetic perturbations on the global dynamics (i.e., synthesis, splicing and degradation) of the transcriptome, and gene-specific synthesis and degradation regulation across all gene perturbations.

[0243] In one embodiment, the splicing dynamics of the transcriptome can be reflected by the ratio of nascent reads mapped to exonic regions.

[0244] In some embodiments, the methods of the invention involve the step of contacting a plurality of cells with an sgRNA library. In some embodiments, the sgRNA library comprises at least 50, 100, 150, 200, 250, 300, 350, 400, 450, 500, 550, 600, 650, 700, 750, 800, 850, 900, 950, 1000, or more than 1000 plasmids for expression of unique sgRNA species.

[0245] In some embodiments, the methods of the invention involve the step of contacting a plurality of cells with an sgRNA library. In some embodiments, the sgRNA library comprises at least 50, 100, 150, 200, 250, 300, 350, 400, 450, 500, 550, 600, 650, 700, 750, 800, 850, 900, 950, 1000, or more than 1000 plasmids for expression of unique sgRNA species.

[0246] In some embodiments, the plurality of cells are contacted with the sgRNA library at a concentration of at least about 1000× coverage/sgRNA. In some embodiments, the plurality of cells are contacted with the sgRNA library at a concentration of at least about 2000× coverage/sgRNA. In some embodiments, the cells are contacted with the sgRNA library such that each cell is transduced with a single sgRNA. In some embodiments, the plasmids of the sgRNA library express a selectable marker (e.g., an antibiotic resistance gene) and transduced cells are selected by contacting the plurality of cells with selection compound (e.g., an antibiotic) for at least one day.

[0247] In some embodiments, the methods of the invention involve the use of a catalytically dead Cas9 protein. In some embodiments, the catalytically dead Cas9 protein is inducible. In one embodiment, the inducible catalytically dead Cas9 protein is dCas9-KRAB-MeCP2 which is inducible in the presence of doxycycline. In some embodiments, expression of the catalytically dead Cas9 protein is induced for at least 1 day by the addition of an induction agent (e.g., doxycycline) to the cell culture media. In some embodiments, the sgRNA library transfected cells are cultured for at least 2, 3, 4, 5, 6, 7, or more than days in the presence of the induction agent for inducing expression of the catalytically dead Cas9 protein.

[0248] In some embodiments, the sgRNA library transfected cells are cultured in media to sensitize the cells to perturbation. For example, in some embodiments, the cells are cultured in L-glutamine+, sodium pyruvate−, high glucose DMEM to sensitize the cells to perturbations of energy metabolism genes. In some embodiments, the cells are cultured for at least 2, 3, 4, 5, 6, 7, or more than days in the presence of the media to sensitize the cells to perturbation.

[0249] In some embodiments, the sgRNA library transfected cells are cultured in media comprising a combination of an inducing agent to induce expression of catalytically dead Cas9 as well as one or more agent or condition to sensitize the cells to perturbation. In some embodiments, the cells are cultured for at least 2, 3, 4, 5, 6, 7, or more than days in the presence of the media to sensitize the cells to perturbation further comprising an inducing agent to induce expression of the catalytically dead Cas9. In some embodiments, the cells are cultured for at least 7 days in L-glutamine+, sodium pyruvate−, high glucose DMEM further comprising an induction agent to induce expression of the catalytically dead Cas9. In some embodiments, the cells are cultured for at least 7 days in L-glutamine+, sodium pyruvate−, high glucose DMEM further comprising doxycycline.

[0250] In some embodiments the method further comprises a step of labeling nascent transcripts to allow for separation of nascent transcripts from the pre-existing transcripts in the total transcriptome content in downstream sequencing data. Any method known in the art for labeling nascent transcripts can be used in the method of the invention to label nascent transcripts including, but not limited to, 5-Bromouridine (BrU) or 4-thiouridine (4sU) labeling. For example, in some embodiments the method further comprises adding 4sU to the cells to label nascent transcripts. In some embodiments, the sgRNA library transfected cells that have been cultured in the presence of an inducing agent to induce expression of catalytically dead Cas9 are contacted with 4sU for at least 30 min, 1 hour, 2 hours, 3 hours or for about four hours immediately prior to harvesting the cells for isolation of nucleic acid molecules (e.g., RNA, mRNA) for sequence library preparation.

[0251] In some embodiments, the incorporated RNA metabolic label(s) undergo chemical conversion prior to generation of a nucleic acid sequencing library. For example, in some embodiments, the 4sU is chemically converted to cytidine prior to library preparation. Methods for chemically converting RNA metabolic labels are known in the art and can be used for chemical conversion of the incorporated RNA metabolic label(s) in the method of the invention.

[0252] In some embodiments, a subset of cells is collected following selection of the sgRNA transfection for analysis as the “Day 0” or initial “bulk” sequencing library. In some embodiments, genomic DNA, transcriptomic RNA, or a combination there of is isolated and analyzed from this first bulk sequencing library. Tables 1 and 2 and Example 2 provides a set of primer sequences for use in generating a bulk analysis sequencing library.

[0253] In some embodiments, a subset of cells is collected following addition of the RNA metabolic label, but prior to chemical conversion of the label for analysis as a second “bulk” sequencing library. In some embodiments, genomic DNA, transcriptomic RNA, or a combination there of is isolated and analyzed from this second bulk sequencing library. Tables 11 and 12 and Example 5 provide exemplary primer sequences for use in generating a bulk analysis sequencing library.

### Samples

[0254] In some embodiments, a sample is a biological sample. Non-limiting examples of biological samples include tissues, cells, and bodily fluids (e.g., blood, urine, saliva, cerebrospinal fluid, and semen). The biological sample may be adult tissue, embryonic tissue, or fetal tissue, for example. In some embodiments, a biological sample is from a human or other animal. For example, a biological sample may be obtained from a murine (e.g., mouse or rat), feline (e.g., cat), canine (e.g., dog), equine (e.g., horse), bovine (e.g., cow), leporine (e.g., rabbit), porcine (e.g., pig), hircine (e.g., goat), ursine (e.g., bear), or piscine (e.g., fish). Other animals are contemplated herein.

[0255] In some embodiments, a biological sample is fixed, and thus is referred to as a fixed biological sample. Fixation (e.g., tissue fixation) refers to the process of chemically preserving the natural state of a biological sample, for example, for subsequent histological analysis. Various fixation agents are routinely used, including, for example, formalin (e.g., formalin fixed paraffin embedded (FFPE) tissue), formaldehyde, paraformaldehyde and glutaraldehyde, any of which may be used herein to fix a biological sample. Other fixation reagents (fixatives) are contemplated herein.

[0256] In some embodiments, the biological sample is a tissue. In some embodiments, the biological sample is a cell. A biological sample, such as a tissue or a cell, in some embodiments, is sectioned and mounted on a surface, such as a slide. In such embodiments, the sample may be fixed before or after it is sectioned. In some embodiments, the fixation process involves perfusion of the animal from which the sample is collected.

[0257] Nucleic acid molecules suitable as templates for use in generating a multi-indexed library of the invention include any nucleic acid molecule or population of nucleic acid molecules (e.g., DNA, RNA, mRNA, sgRNA), particularly those derived from a cell or tissue. In one aspect, a population of mRNA molecules (a number of different mRNA molecules, typically obtained from cells or tissue) are used to make a multi-indexed cDNA library, in accordance with the invention. Exemplary sources of nucleic acid templates include viruses, virally infected cells, bacterial cells, fungal cells, plant cells and animal cells.

### Reaction Solutions

[0258] Various reaction solutions can be used for performing the different reactions (RT, PCR, tagmentation, ligation, etc.) of the methods of the invention.

[0259] In some embodiments, one or more reaction solution comprises a buffering agent. The concentration of the buffering agent in the reaction solutions of the invention will vary with the particular buffering agent used. Typically, the working concentration (i.e., the concentration in the reaction mixture) of the buffering agent will be from about 5 mM to about 500 mM (e.g., about 10 mM, about 15 mM, about 20 mM, about 25 mM, about 30 mM, about 35 mM, about 40 mM, about 45 mM, about 50 mM, about 55 mM, about 60 mM, about 65 mM, about 70 mM, about 75 mM, about 80 mM, about 85 mM, about 90 mM, about 95 mM, about 100 mM, from about 5 mM to about 500 mM, from about 10 mM to about 500 mM, from about 20 mM to about 500 mM, from about 25 mM to about 500 mM, from about 30 mM to about 500 mM, from about 40 mM to about 500 mM, from about 50 mM to about 500 mM, from about 75 mM to about 500 mM, from about 100 mM to about 500 mM, from about 25 mM to about 50 mM, from about 25 mM to about 75 mM, from about 25 mM to about 100 mM, from about 25 mM to about 200 mM, from about 25 mM to about 300 mM, etc.). When Tris (e.g., Tris-HCl) is used, the Tris working concentration will typically be from about 5 mM to about 100 mM, from about 5 mM to about 75 mM, from about 10 mM to about 75 mM, from about 10 mM to about 60 mM, from about 10 mM to about 50 mM, from about 25 mM to about 50 mM, etc.

[0260] The final pH of solutions of the invention will generally be set and maintained by buffering agents present in reaction solutions of the invention. The pH of reaction solutions of the invention, and hence reaction mixtures of the invention, will vary with the particular use and the buffering agent present but will often be from about pH 5.5 to about pH 9.0 (e.g., about pH 6.0, about pH 6.5, about pH 7.0, about pH 7.1, about pH 7.2, about pH 7.3, about pH 7.4, about pH 7.5, about pH 7.6, about pH 7.7, about pH 7.8, about pH 7.9, about pH 8.0, about pH 8.1, about pH 8.2, about pH 8.3, about pH 8.4, about pH 8.5, about pH 8.6, about pH 8.7, about pH 8.8, about pH 8.9, about pH 9.0, from about pH 6.0 to about pH 8.5, from about pH 6.5 to about pH 8.5, from about pH 7.0 to about pH 8.5, from about pH 7.5 to about pH 8.5, from about pH 6.0 to about pH 8.0, from about pH 6.0 to about pH 7.7, from about pH 6.0 to about pH 7.5, from about pH 6.0 to about pH 7.0, from about pH 7.2 to about pH 7.7, from about pH 7.3 to about pH 7.7, from about pH 7.4 to about pH 7.6, from about pH 7.0 to about pH 7.4, from about pH 7.6 to about pH 8.0, from about pH 7.6 to about pH 8.5, from about pH 7.7 to about pH 8.5, from about pH 7.9 to about pH 8.5, from about pH 8.0 to about pH 8.5, from about pH 8.2 to about pH 8.5, from about pH 8.3 to about pH 8.5, from about pH 8.4 to about pH 8.5, from about pH 8.4 to about pH 9.0, from about pH 8.5 to about pH 9.0, etc.)

[0261] In some embodiments, one or more monovalent cationic salts (e.g., LiCl, NaCl, KCl, NH₄Cl, etc.) may be included in reaction solutions of the invention. In many instances, salts used in reaction solutions of the invention will dissociate in solution to generate at least one species which is monovalent (e.g., Li⁺, Na⁺, K⁺, NH₄⁺, etc.) When included in reaction solutions of the invention, salts will often be present either individually or in a combined concentration of from about 0.5 mM to about 500 mM (e.g., about 1 mM, about 2 mM, about 3 mM, about 5 mM, about 10 mM, about 12 mM, about 15 mM, about 17 mM, about 20 mM, about 22 mM, about 23 mM, about 24 mM, about 25 mM, about 27 mM, about 30 mM, about 35 mM, about 40 mM, about 45 mM, about 50 mM, about 55 mM, about 60 mM, about 64 mM, about 65 mM, about 70 mM, about 75 mM, about 80 mM, about 85 mM, about 90 mM, about 95 mM, about 100 mM, about 120 mM, about 140 mM, about 150 mM, about 175 mM, about 200 mM, about 225 mM, about 250 mM, about 275 mM, about 300 mM, about 325 mM, about 350 mM, about 375 mM, about 400 mM, from about 1 mM to about 500 mM, from about 5 mM to about 500 mM, from about 10 mM to about 500 mM, from about 20 mM to about 500 mM, from about 30 mM to about 500 mM, from about 40 mM to about 500 mM, from about 50 mM to about 500 mM, from about 60 mM to about 500 mM, from about 65 mM to about 500 mM, from about 75 mM to about 500 mM, from about 85 mM to about 500 mM, from about 90 mM to about 500 mM, from about 100 mM to about 500 mM, from about 125 mM to about 500 mM, from about 150 mM to about 500 mM, from about 200 mM to about 500 mM, from about 10 mM to about 100 mM, from about 10 mM to about 75 mM, from about 10 mM to about 50 mM, from about 20 mM to about 200 mM, from about 20 mM to about 150 mM, from about 20 mM to about 125 mM, from about 20 mM to about 100 mM, from about 20 mM to about 80 mM, from about 20 mM to about 75 mM, from about 20 mM to about 60 mM, from about 20 mM to about 50 mM, from about 30 mM to about 500 mM, from about 30 mM to about 100 mM, from about 30 mM to about 70 mM, from about 30 mM to about 50 mM, etc.).

[0262] In some embodiments, one or more reaction solution comprises a buffering agent, one or more divalent cationic salts (e.g., MnCl₂, MgCl₂, MgSO₄, CaCl₂), etc.) may be included in reaction solutions of the invention. In many instances, salts used in reaction solutions of the invention will dissociate in solution to generate at least one species which is divalent (e.g., Mg⁺⁺, Mn⁺⁺, Ca⁺⁺, etc.) When included in reaction solutions of the invention, salts will often be present either individually or in a combined concentration of from about 0.5 mM to about 500 mM (e.g., about 1 mM, about 2 mM, about 3 mM, about 4 mM, about 5 mM, about 6 mM, about 7 mM, about 8 mM, about 9 mM, about 10 mM, about 12 mM, about 15 mM, about 17 mM, about 20 mM, about 22 mM, about 23 mM, about 24 mM, about 25 mM, about 27 mM, about 30 mM, about 35 mM, about 40 mM, about 45 mM, about 50 mM, about 55 mM, about 60 mM, about 64 mM, about 65 mM, about 70 mM, about 75 mM, about 80 mM, about 85 mM, about 90 mM, about 95 mM, about 100 mM, about 120 mM, about 140 mM, about 150 mM, about 175 mM, about 200 mM, about 225 mM, about 250 mM, about 275 mM, about 300 mM, about 325 mM, about 350 mM, about 375 mM, about 400 mM, from about 1 mM to about 500 mM, from about 5 mM to about 500 mM, from about 10 mM to about 500 mM, from about 20 mM to about 500 mM, from about 30 mM to about 500 mM, from about 40 mM to about 500 mM, from about 50 mM to about 500 mM, from about 60 mM to about 500 mM, from about 65 mM to about 500 mM, from about 75 mM to about 500 mM, from about 85 mM to about 500 mM, from about 90 mM to about 500 mM, from about 100 mM to about 500 mM, from about 125 mM to about 500 mM, from about 150 mM to about 500 mM, from about 200 mM to about 500 mM, from about 10 mM to about 100 mM, from about 10 mM to about 75 mM, from about 10 mM to about 50 mM, from about 20 mM to about 200 mM, from about 20 mM to about 150 mM, from about 20 mM to about 125 mM, from about 20 mM to about 100 mM, from about 20 mM to about 80 mM, from about 20 mM to about 75 mM, from about 20 mM to about 60 mM, from about 20 mM to about 50 mM, from about 30 mM to about 500 mM, from about 30 mM to about 100 mM, from about 30 mM to about 70 mM, from about 30 mM to about 50 mM, etc.).

[0263] When included in reaction solutions of the invention, reducing agents (e.g., dithiothreitol, β-mercaptoethanol, etc.) will often be present either individually or in a combined concentration of from about 0.1 mM to about 50 mM (e.g., about 0.2 mM, about 0.3 mM, about 0.5 mM, about 0.7 mM, about 0.9 mM, about 1 mM, about 2 mM, about 3 mM, about 4 mM, about 5 mM, about 6 mM, about 10 mM, about 12 mM, about 15 mM, about 17 mM, about 20 mM, about 22 mM, about 23 mM, about 24 mM, about 25 mM, about 27 mM, about 30 mM, about 35 mM, about 40 mM, about 45 mM, about 50 mM, from about 0.1 mM to about 50 mM, from about 0.5 mM to about 50 mM, from about 1 mM to about 50 mM, from about 2 mM to about 50 mM, from about 3 mM to about 50 mM, from about 0.5 mM to about 20 mM, from about 0.5 mM to about 10 mM, from about 0.5 mM to about 5 mM, from about 0.5 mM to about 2.5 mM, from about 1 mM to about 20 mM, from about 1 mM to about 10 mM, from about 1 mM to about 5 mM, from about 1 mM to about 3.4 mM, from about 0.5 mM to about 3.0 mM, from about 1 mM to about 3.0 mM, from about 1.5 mM to about 3.0 mM, from about 2 mM to about 3.0 mM, from about 0.5 mM to about 2.5 mM, from about 1 mM to about 2.5 mM, from about 1.5 mM to about 2.5 mM, from about 2 mM to about 3.0 mM, from about 2.5 mM to about 3.0 mM, from about 0.5 mM to about 2 mM, from about 0.5 mM to about 1.5 mM, from about 0.5 mM to about 1.1 mM, from about 5.0 mM to about 10 mM, from about 5.0 mM to about 15 mM, from about 5.0 mM to about 20 mM, from about 10 mM to about 15 mM, from about 10 mM to about 20 mM, etc.).

[0264] Reaction solutions of the invention may also contain one or more ionic or non-ionic detergent (e.g., TRITON X-100™, NONIDET P40™, sodium dodecyl sulfate, etc.). When included in reaction solutions of the invention, detergents will often be present either individually or in a combined concentration of from about 0.01% to about 5.0% (e.g., about 0.01%, about 0.02%, about 0.03%, about 0.04%, about 0.05%, about 0.06%, about 0.07%, about 0.08%, about 0.09%, about 0.1%, about 0.15%, about 0.2%, about 0.3%, about 0.5%, about 0.7%, about 0.9%, about 1%, about 2%, about 3%, about 4%, about 5%, from about 0.01% to about 5.0%, from about 0.01% to about 4.0%, from about 0.01% to about 3.0%, from about 0.01% to about 2.0%, from about 0.01% to about 1.0%, from about 0.05% to about 5.0%, from about 0.05% to about 3.0%, from about 0.05% to about 2.0%, from about 0.05% to about 1.0%, from about 0.1% to about 5.0%, from about 0.1% to about 4.0%, from about 0.1% to about 3.0%, from about 0.1% to about 2.0%, from about 0.1% to about 1.0%, from about 0.1% to about 0.5%, etc.). For example, reaction solutions of the invention may contain TRITON X-100™ at a concentration of from about 0.01% to about 2.0%, from about 0.03% to about 1.0%, from about 0.04% to about 1.0%, from about 0.05% to about 0.5%, from about 0.04% to about 0.6%, from about 0.04% to about 0.3%, etc.

[0265] Reaction solutions of the invention may also contain one or more stabilizing agents (e.g., PEG8000, trehalose, betaine, BSA, glycerol). In some embodiments, when included in reaction solutions of the invention, stabilizing agents are present either individually or in a combined concentration from 0.01 M to about 50 M (e.g., about 0.05M, about 0.1 M, 0.2 M, about 0.3 M, about 0.5 M, about 0.6 M, about 0.7 M, about 0.9 M, about 1 M, about 2 M, about 3 M, about 4 M, about 5 M, about 6 M, about 10 M, about 12 M, about 15 M, about 17 M, about 20 M, about 22 M, about 23 M, about 24 M, about 25 M, about 27 M, about 30 M, about 35 M, about 40 M, about 45 M, about 50 M, from about 0.1 M to about 1 M, from about 0.5 M to about 5 M, from about 0.2 M to about 2 M, from about 0.3 M to about 3 M, from about 0.4 M to about 4 M, from about 0.5 M to about 5 M, from about 0.2 M to about 0.8 M, from about 0.5 M to about 1 M, from about 0.05 M to about 1 M, from about 0.05 M to about 10 M, from about 0.05 M to about 20M, etc.). In some embodiments, when included in reaction solutions of the invention, such stabilizing agents are present either individually or in a combined concentration of from about 0.01 mg/ml to about 100 mg/ml (e.g., about 0.01 mg/ml, about 0.02 mg/ml, about 0.03 mg/ml, about 0.04 mg/ml, about 0.05 mg/ml, about 0.06 mg/ml, about 0.07 mg/ml, about 0.08 mg/ml, about 0.09 mg/ml, about 0.1 mg/ml, about 0.11 mg/ml, about 0.12 mg/ml, about 0.15 mg/ml, about 0.17 mg/ml, about 0.2 mg/ml, about 0.25 mg/ml, about 0.35 mg/ml, about 0.5 mg/ml, about 0.75 mg/ml, about 1.0 mg/ml, about 1.5 mg/ml, about 2.0 mg/ml, about 2.5 mg/ml, about 3.0 mg/ml, about 3.5 mg/ml, about 4.0 mg/ml, about 5.0 mg/ml, about 6.0 mg/ml, about 7.0 mg/ml, about 8.0 mg/ml, about 9.0 mg/ml, about 10.0 mg/ml, from about 0.05 mg/ml to about 3.0 mg/ml, from about 0.1 mg/ml to about 5.0 mg/ml, from about 0.2 mg/ml to about 2.0 mg/ml, etc.). In some embodiments, when included in reaction solutions of the invention, such stabilizing agents are be present either individually or in a combined concentration of from about 0.1% to about 50% (e.g., about 0.1%, about 0.2%, about 0.3%, about 0.4%, about 0.5%, about 0.6%, about 0.7%, about 0.8%, about 0.9%, about 1.0%, about 1.5%, about 2.0%, about 3.0%, about 5.0%, about 7.0%, about 9.0%, about 10%, about 11%, about 12%, about 13%, about 14%, about 15%, about 20%, about 22%, about 25%, about 27%, about 30%, about 35%, about 40%, about 45%, about 50%, from about 0.1% to about 50%, from about 0.1% to about 40%, from about 0.1% to about 30%, from about 0.0% to about 20%, from about 0.1% to about 10%, etc.

[0266] Reaction solutions the invention may also contain one or more additional additives that improve enzymatic activity, including agents that improve primer utilization efficiency and improve product yield.

[0267] In many instances, nucleotides (e.g., dNTPs, such as dGTP, dATP, dCTP, dTTP, etc.) will be present in reaction mixtures of the invention. Typically, individual nucleotides will be present in concentrations of from about 0.05 mM to about 50 mM (e.g., about 0.07 mM, about 0.1 mM, about 0.15 mM, about 0.18 mM, about 0.2 mM, about 0.3 mM, about 0.5 mM, about 0.7 mM, about 0.9 mM, about 1 mM, about 2 mM, about 3 mM, about 4 mM, about 5 mM, about 6 mM, about 10 mM, about 12 mM, about 15 mM, about 17 mM, about 20 mM, about 22 mM, about 23 mM, about 24 mM, about 25 mM, about 27 mM, about 30 mM, about 35 mM, about 40 mM, about 45 mM, about 50 mM, from about 0.1 mM to about 50 mM, from about 0.5 mM to about 50 mM, from about 1 mM to about 50 mM, from about 2 mM to about 50 mM, from about 3 mM to about 50 mM, from about 0.5 mM to about 20 mM, from about 0.5 mM to about 10 mM, from about 0.5 mM to about 5 mM, from about 0.5 mM to about 2.5 mM, from about 1 mM to about 20 mM, from about 1 mM to about 10 mM, from about 1 mM to about 5 mM, from about 1 mM to about 3.4 mM, from about 0.5 mM to about 3.0 mM, from about 1 mM to about 3.0 mM, from about 1.5 mM to about 3.0 mM, from about 2 mM to about 3.0 mM, from about 0.5 mM to about 2.5 mM, from about 1 mM to about 2.5 mM, from about 1.5 mM to about 2.5 mM, from about 2 mM to about 3.0 mM, from about 2.5 mM to about 3.0 mM, from about 0.5 mM to about 2 mM, from about 0.5 mM to about 1.5 mM, from about 0.5 mM to about 1.1 mM, from about 5.0 mM to about 10 mM, from about 5.0 mM to about 15 mM, from about 5.0 mM to about 20 mM, from about 10 mM to about 15 mM, from about 10 mM to about 20 mM, etc.). The combined nucleotide concentration, when more than one nucleotide is present, can be determined by adding the concentrations of the individual nucleotides together. When more than one nucleotide is present in reaction solutions of the invention, the individual nucleotides may not be present in equimolar amounts. Thus, a reaction solution may contain, for example, 1 mM dGTP, 1 mM dATP, 0.5 mM dCTP, and 1 mM dTTP.

[0268] Enzymes such as reverse transcriptases, ligases, polymerases, or transposases may also be present in reaction solutions. When present, enzymes will often be present in a concentration which results in about 0.01 to about 1,000 units of enzymatic activity/μl (e.g., about 0.01 unit/μl, about 0.05 unit/μl, about 0.1 unit/μl, about 0.2 unit/μl, about 0.3 unit/μl, about 0.4 unit/μl, about 0.5 unit/μl, about 0.7 unit/μl, about 1.0 unit/μl, about 1.5 unit/μl, about 2.0 unit/μl, about 2.5 unit/μl, about 5.0 unit/μl, about 7.5 unit/μl, about 10 unit/μl, about 20 unit/μl, about 25 unit/μl, about 50 unit/μl, about 100 unit/μl, about 150 unit/μl, about 200 unit/μl, about 250 unit/μl, about 350 unit/μl, about 500 unit/μl, about 750 unit/μl, about 1,000 unit/μl, from about 0.1 unit/μl to about 1,000 unit/μl, from about 0.2 unit/μl to about 1,000 unit/μl, from about 1.0 unit/μl to about 1,000 unit/μl, from about 5.0 unit/μl to about 1,000 unit/μl, from about 10 unit/μl to about 1,000 unit/μl, from about 20 unit/μl to about 1,000 unit/μl, from about 50 unit/μl to about 1,000 unit/μl, from about 100 unit/μl to about 1,000 unit/μl, from about 200 unit/μl to about 1,000 unit/μl, from about 400 unit/μl to about 1,000 unit/μl, from about 500 unit/μl to about 1,000 unit/μl, from about 0.1 unit/μl to about 300 unit/μl, from about 0.1 unit/μl to about 200 unit/μl, from about 0.1 unit/μl to about 100 unit/μl, from about 0.1 unit/μl to about 50 unit/μl, from about 0.1 unit/μl to about 10 unit/μl, from about 0.1 unit/μl to about 5.0 unit/μl, from about 0.1 unit/μl to about 1.0 unit/μl, from about 0.2 unit/μl to about 0.5 unit/μl, etc.

[0269] Reaction solutions of the invention may be prepared as concentrated solutions (e.g., 5× solutions) which are diluted to a working concentration for final use. With respect to a 5× reaction solution, a 5:1 dilution is required to bring such a 5× solution to a working concentration. Reaction solutions of the invention may be prepared, for examples, as a 2×, a 3×, a 4×, a 5×, a 6×, a 7×, a 8×, a 9×, a 10×, etc. solutions. One major limitation on the fold concentration of such solutions is that, when compounds reach particular concentrations in solution, precipitation occurs. Thus, concentrated reaction solutions will generally be prepared such that the concentrations of the various components are low enough so that precipitation of buffer components will not occur. As one skilled in the art would recognize, the upper limit of concentration which is feasible for each solution will vary with the particular solution and the components present.

[0270] In many instances, reaction solutions of the invention will be provided in sterile form. Sterilization may be performed on the individual components of reaction solutions prior to mixing or on reaction solutions after they are prepared. Sterilization of such solutions may be performed by any suitable means including autoclaving or ultrafiltration.

### Kits

[0271] The invention is also directed to kits for use in the library preparation methods of the invention. Such kits can be used for making multi-indexed sequencing libraries. Kits of the invention may comprise a carrier, such as a box or carton, having in close confinement therein one or more containers, such as vials, tubes, bottles and the like. In kits of the invention, a first container may contain one or more of the reverse transcriptase enzymes of the invention or one or more of the indexed reverse transcription primer sets and one or more additional container may contain one or more of the ligation enzymes of the invention or the indexed ligation primer set. Kits of the invention may also comprise, in the same or different containers, at least one component selected from one or more adaptor molecule, one or more indexed PCR primer, or other component for performing the library preparation method of the invention. In one embodiment, kits of the invention may also comprise, in the same or different containers, an optimized reaction buffer as described elsewhere herein, or components used to produce the optimized reaction buffer. Alternatively, the components of the kit may be divided into separate containers.

[0272] The invention is also directed to kits for use in methods of the invention. Such kits can be used for making, sequencing or amplifying nucleic acid molecules (single- or double-stranded), e.g., at the particular temperatures described herein. Kits of the invention may comprise a carrier, such as a box or carton, having in close confinement therein one or more (e.g., one, two, three, four, five, ten, twelve, fifteen, etc.) containers, such as vials, tubes, bottles and the like. In kits of the invention, a first container contains one or more of the indexed oligonucleotide sets of the present invention. Kits of the invention may also comprise, in the same or different containers, one or more reverse transcriptases, DNA ligases, DNA polymerases (e.g., thermostable DNA polymerases), transposases, one or more (e.g., one, two, three, four, five, ten, twelve, fifteen, etc.) suitable buffers for nucleic acid synthesis, one or more nucleotides and one or more (e.g., one, two, three, four, five, ten, twelve, fifteen, etc.) additional oligonucleotide primers. Kits of the invention also may comprise instructions or protocols for carrying out the methods of the invention.

[0273] In one embodiment, the kit includes instructional material that describes the use of the kit to generate a multi-indexed sequencing library, wherein the instructional material creates an increased functional relationship between the kit components and the individual using the kit. In one embodiment, the kit is utilized by one person or entity. In another embodiment, the kit is utilized by more than one person or entity. In one embodiment, the kit is used without any additional compositions or methods. In another embodiment, the kit is used with at least one additional composition or method.

### EXPERIMENTAL EXAMPLES

[0274] The invention is further described in detail by reference to the following experimental examples. These examples are provided for purposes of illustration only, and are not intended to be limiting unless otherwise specified. Thus, the invention should in no way be construed as being limited to the following examples, but rather, should be construed to encompass any and all variations which become evident as a result of the teaching provided herein.

[0275] Without further description, it is believed that one of ordinary skill in the art can, using the preceding description and the following illustrative examples, make and utilize the compounds of the present invention and practice the claimed methods. The following working examples therefore, specifically point out the preferred embodiments of the present invention, and are not to be construed as limiting in any way the remainder of the disclosure.

### Example 1: a Global View of Aging and Alzheimer's Pathogenesis-Associated Cell Population Dynamics in Mammalian Brain

[0276] In this example, a global view of aging and AD pathogenesis-associated cell population dynamics was obtained, by profiling ˜1.5 million single-cell transcriptomes at full gene body coverage and ˜380,000 single-cell chromatin accessibility profiles across the entire mammalian brains spanning various age and genotype groups. With the resulting datasets, over 300 cellular subtypes across the brain were identified, including extremely rare cell types (e.g., pinealocytes, tanycytes) that exist in less than 0.01% of the brain cell population. In addition, region-specific aging and AD effects were detected with high-resolution spatial transcriptomic analysis and the cell-type-specific manifestation of aging and AD-associated signatures were explored at both gene and isoform levels. With the EasySci method, a technical framework for individual laboratories to generate gene expression and chromatin accessibility profiles from millions of single cells cost-effectively is introduced. The EasySci pipeline, detailed experimental protocols, computation scripts, and datasets was made freely available to facilitate further exploration of the techniques and datasets.

[0277] As illustrated by the sub-cluster level analysis, the effects of aging and AD on the global brain cell population are highly cell-type-specific. While most brain cell types stay relatively stable the various conditions, many cell subtypes that are significantly changed (over two-fold change) in aged and AD model brains were identified, most of which were rare cell types and thus presumably missed in conventional “shallow” single-cell analysis. For example, the aged brain is characterized by the depletion of both rare neuronal progenitor cells and differentiating oligodendrocytes, associated with the enrichment of a C4b+ Serpina3n+ reactive oligodendrocyte subtype surrounding the subventricular zone (SVZ), suggesting a potential interplay between oligodendrocytes, local inflammatory signaling and the stem cell niche. Meanwhile, shared subtypes that were depleted (e.g., mt-Cytb+ mt-Rnr2− choroid plexus epithelial cell) or enriched (e.g., Col25a+ Ndrg1+ interbrain and midbrain neuron) in both early- and late-onset AD mutant brains were observed, validated by single-cell RNA-seq from both sexes as well as spatial transcriptomics analysis.

[0278] In summary, this example demonstrated the potential of novel ‘high-throughput’ single-cell genomics for quantifying the dynamics of rare cell types and novel subtypes associated with development, aging, and disease. Further development of high-throughput single-cell profiling strategies and computation approaches would make it possible to generate a comprehensive view of cell-type-specific dynamics across all mammalian organs through “saturate sequencing”, which may be especially critical for identifying rare cell types in human samples.

[0279] The major improvements of EasySci-RNA (FIG. 1a, FIG. 2, FIG. 3), include: (i) one million single-cell transcriptomes prepared at a library preparation cost of around $700, less than 1/300 the cost of the commercial platforms (Ding et al., Nat. Biotechnol. 38, 737-746 (2020)) (FIG. 1b). (ii) nuclei are deposited to different wells for reverse transcription with indexed oligo-dT and random hexamer primers (i.e., different molecular barcodes to separate reads primed by two types of primers and across different wells), thus recovering cell-type-specific gene expression at full gene body coverage (FIG. 1c). (iii) chemically modified oligos were included in the ligation reaction to prevent the formation of primer-dimers and increase the detection efficiency (FIG. 3); (iv) Cell recovery rate, as well as the number of transcripts detected per cell, were significantly improved through optimized nuclei storage and enzymatic reactions (FIG. 3). The optimized technique yields significantly higher signals per nucleus compared with the published sci-RNA-seq3 and the commercial platform (e.g., 10× Genomics) (FIG. 1d, FIG. 3n).

[0280] Leveraging the technical innovations from the development of EasySci-RNA, the recently published single-cell chromatin accessibility profiling method by combinatorial indexing was further optimized (sci-ATAC-seq3) (Domcke, S. et al., Science 370, (2020); Cusanovich, D. A. et al., Cell 174, 1309-1324.e18 (2018)). Critical additional improvements include: (i) tagmentation reaction with indexed Tn5 that are fully compatible with indexed ligation primers of EasySci-RNA; (ii) a modified nuclei extraction and cryostorage procedure to further increase the reaction efficiency and signal specificity (FIG. 4). The detailed protocols for the EasySci is provided as Example 2.

[0281] The Materials and Methods are now described.

### Animals

[0282] C57BL/6 wild-type mouse brains at three months (n=4), six months (n=4), and twenty-one months (n=4) were collected in this study. These age points correspond to approximately 20, 30, and 62 years in humans. Furthermore, to gain insight into the early cellular state changes underlying the pathophysiology of Alzheimer's disease, two AD models at 3-month-old from the same C57BL/6 background were added. These include an early-onset AD model (5×FAD) that overexpresses mutant human amyloid-beta precursor protein (APP) with the Swedish (K670N, M671L), Florida (I716V), and London (V717I) Familial Alzheimer's Disease (FAD) mutations and human presenilin 1 (PS1) harboring two FAD mutations, M146L and L286V. Brain-specific overexpression is achieved by neural-specific elements of the mouse Thy1 promoter (Oakley, H. et al., J. Neurosci. 26, 10129-10140 (2006)). The second, late-onset AD model (APOE*4/Trem2*R47H) in this study carries two of the highest risk factor mutations of LOAD (Karch, Biol. Psychiatry 77, 43-51 (2015)). including a humanized ApoE knock-in allele, where exons 2, 3, and most of exon 4 of the mouse gene were replaced by the human ortholog including exons 2, 3, 4 and some part of the 3′ UTR. Furthermore, a knock-in missense point mutation in the mouse Trem2 gene was also introduced, consisting of an R47H mutation, along with two other silent mutations (jax.org/strain/028709). Two male and two female mice are included in each condition.

[0283] By studying 3-month-old animals, the goal was to gain insight into the early changes underlying the pathophysiology of the AD models. Mature adult mice start at the age of 3 months, but multiple AD hallmarks, including amyloid beta plaques and gliosis, can be observed in the early-onset 5×FAD model (alzforum.org/research-models/5×fad-b6sjl). Therefore, this age might be the most appropriate to study early contributors of Alzheimer's disease pathogenesis.

### EasySci-RNA Library Preparation and Sequencing

[0284] Extracted mouse brains were snap-frozen in liquid nitrogen and stored at −80° C. Detailed step-by-step EasySci-RNA protocol is included as Example 2.

### Computational Procedures for Processing EasySci-RNA Libraries

[0285] A custom computational pipeline was developed to process the raw fastq files from the EasySci libraries. Similar to previous studies (Cao, J. et al., Science 370, (2020); Cao, J. et al., Nature 566, 496-502 (2019)), the barcodes of each read pair were extracted. Both adaptor and barcode sequences were trimmed from the reads. Second, an extra trimming step is implemented using Trim Galore (github.com/FelixKrueger/TrimGalore) with default settings to remove the poly (A) sequences and the low-quality base calls from the cDNA. Afterward, the paired-end sequences were aligned to the genome with the STAR aligner (Dobin et al., Bioinformatics 29, 15-21 (2013)), and the PCR duplicates removed based on the UMI sequence and the alignment location. Finally, the reads are split into SAM files per cell, and the gene expression is counted using a custom script. At this level, the reads from the same cell originating from the short dT and the random hexamer RT primers were counted as independent cells. During the gene counting step, reads were assigned to genes if the aligned coordinates overlapped with the gene locations on the genome. If a read was ambiguous between genes and derived from the short dT RT primer, the read was assigned to the gene with the closest 3′ end; otherwise, the reads were labeled as ambiguous and not counted. If no gene was found during this step, candidate genes 1000 bp upstream of the read or genes on the opposite strand were then searched for. Reads without any overlapped genes were discarded.

[0286] A similar strategy to generate an exon count matrix across cells was used. Specifically, the number of expressed exons based on the number of reads overlapping each exon was counted. If one read overlapped with multiple exons, this read was split between the exons. Read overlapped with multiple genes were discarded, except if the exact gene based on the other paired end read can be determined. For reads without overlapped genes, it was checked if there are any overlapped exons on the opposite strand. Reads without any overlapped exons were discarded.

### Cell Clustering and Cell Type Annotation of Single-Cell RNA-Seq Data

[0287] After gene counting, the cells with reads identified by both RT primers were kept. The reads from the same cells were then merged. Low-quality cells were removed based on one of the following criteria: (i) the percentage of unassigned reads>30%, (ii) the number of UMIs>20,000, and (iii) the detected number of genes<200. The Scrublet (Tong et al., Neurogenetics 11, 41-52 (2010)) computational pipeline was then used to identify and remove potential doublets, similar to a previous study (Cao, J. et al., Science 370, (2020)). At the end of these filtering steps, there were around 1.5 million brain cells in the dataset.

[0288] To identify distinct clusters of cells corresponding to different cell types, the 1,469,111 single-cell gene expression profiles were subjected to UMAP visualization and Louvain clustering, similar to a previous study (Cao, J. et al., Science 370, (2020)). the data was then co-embedded with the published datasets (Zeisel, A. et al., Front. Neuroinform. 12, 84 (2018); Yao et al., Nature 598, 103-110 (2021); Kozareva, V. et al., Nature 598, 214-219 (2021)) through Seurat (Stuart, T. et al., Cell 177, 1888-1902.e21 (2019)), and clusters were annotated based on overlapped cell types. The annotations were manually verified and refined based on marker genes. Differentially expressed genes across cell types were identified with the differentialGeneTest( ) function of Monocle 2 (Qiu, X. et al., Nat. Methods 14, 979-982 (2017)). To identify cell type-specific gene markers, genes that were differentially expressed across different cell types (FDR of 5%, likelihood) and also with a >2-fold expression difference between first and second-ranked cell types were selected.

### Isoform Expression Analysis

[0289] Isoform expression was quantified in EasySci data using an adapted version of the pipeline built by Booeshaghi et al. (Booeshaghi, A. S. et al., Nature 598, 195-199 (2021)). Short-dT and random hexamer reads for ˜1.5M single cells were merged into 617 pseudocells, grouping by individual mouse and cell types (31 cell types). The pseudocells were aligned to the mouse transcriptome with kallisto (Melsted, P. et al., Nat. Biotechnol. 1-6 (2021)), generating a raw isoform count matrix. To filter and preprocess the raw data, isoform counts were normalized by length, and genes and isoforms with a dispersion of less than 0.001 were removed. The gene count matrix was produced by aggregating counts of all isoforms of a given gene. Both isoform and gene count matrices were normalized by dividing the counts in each cell by the sum of the counts for that cell, then multiplying by 1,000,000 and transforming with numpy's log 1p( ) function. The filtered data contained 47,659 isoforms corresponding to 16,878 genes. Highly variable isoforms and genes were identified using scanpy, by binning into 20 bins and scaling the dispersion for each feature to zero mean and unit variance within each bin. The top 5,000 gene and isoforms in each matrix were retained based on normalized dispersion. Neighborhood components analysis was performed on the filtered and normalized isoform matrix after scaling the log(1+TPM) expression to zero mean and unit variance, training on cell type labels from each pseudocell with random state 42, and visualized using t-SNE with 5,000 iterations and random state 42. Differentially expressed isoforms were identified by looking for isoforms that were upregulated across a given cell type, while the genes containing those isoforms were not significantly expressed more among that cell type than its complement (the rest of the dataset). Isoforms expressed in less than 90% of pseudocells within a cell type were discarded. T-tests used a significance level of 0.01 with Bonferroni correction for multiple comparisons.

### Sub-Cluster Analysis of the Single-Cell RNA-Seq Data

[0290] To identify cell subtypes, each main cell type was selected and PCA, UMAP and Louvain clustering were applied similarly to the major cluster analysis, based on a combined matrix including the 30 principal components derived from the gene-level expression matrix and the first 10 principal components derived from the exon-level expression matrix. Sub-clusters that were not readily distinguishable in the UMAP space were then merged through an intra-dataset cross-validation procedure described before (Sziraki, A. et al., bioRxiv 2022.09.28.509825 (2022)). A total of 362 cell subtypes were identified, with a median of 1,030 cells in each group. All subtypes were contributed by at least two individuals (median of twenty). Differentially expressed genes and exons across cell types were identified with the differential Gene Test( ) function of Monocle 2 (Qiu, X. et al., Nat. Methods 14, 979-982 (2017)). To identify sub-cluster-specific differentially expressed genes associated with aging or AD models, a maximum of 5,000 cells per condition were sampled for downstream DE gene analysis using the differentialGeneTest function of the Monocle 2 package (Qiu, X. et al., Nat. Methods 14, 979-982 (2017)). The sex of the animals was included as a covariate to reduce gender-specific batch effects.

[0291] To detect cellular fraction changes at the subtype level across various conditions, a cell count matrix was first generated by computing the number of cells from every sub-cluster in each reverse transcription well profiled by EasySci-RNA. Each RT well was regarded as a replicate comprising cells from a specific mouse individual. the likelihood-ratio test was then applied to identify significantly changed sub-clusters between different conditions, with the differentialGeneTest( ) function of Monocle 2 (Qiu, X. et al., Nat. Methods 14, 979-982 (2017)). Sub-clusters were removed if they had less than 20 cells in either the male or female samples. In addition, subclusters were considered to change significantly only if there was at least a two-fold change between two groups and the q-value was less than 0.05.

### Gene Module Analysis

[0292] Gene module analysis was performed to identify the molecular programs underlying different cell types in the brain. First, the gene expression across all sub-clusters was aggregated. The aggregated gene count matrix was then normalized by the library size and then log-transformed (log 10(TPM/10+1)). Genes were removed if they exhibited low expression (less than 1 in all sub-clusters) or low variance of expression (i.e., the gene expression fold change between the maximum expressed sub-cluster and the median expression across sub-clusters are less than 5). The filtered matrix was used as input for UMAP/0.3.2 visualization (McInnes et al., Journal of Open Source Software vol. 3 861 (2018)) (metric=“cosine”, min_dist=0.01, n_neighbors=30). Genes were then clustered based on their 2D UMAP coordinates through densityClust package (rho=1, delta=1) (Rodriguez et al., Science 344, 1492-1496 (2014)).

### EasySci-ATAC Library Preparation and Sequencing

[0293] Mouse brain samples were snap-frozen in liquid nitrogen and stored at −80° C. For nuclei extraction, thawed brain samples were minced in PBS using a blade, re-frozen, stored at −80° C., and processed in multiple batches.

### Data Processing for EasySci-ATAC

[0294] Base calls were converted to fastq format and demultiplexed using Illumina's bcl2fastq/v2.19.0.316 tolerating one mismatched base in barcodes (edit distance (ED)<2). Downstream sequence processing were similar to sci-ATAC-seq (Cao, J. et al., Science 361, 1380-1385 (2018)). Indexed Tn5 barcodes and ligation barcodes were extracted, corrected to its nearest barcode (edit distance (ED)<2) and reads with uncorrected barcodes (ED>=2) were removed. Tn5 adaptors were removed from 5′-end and clipped from 3′-end using trim_galore/0.4.1 (github.com/FelixKrueger/TrimGalore). Trimmed reads were mapped to the mouse genome (mm39) using STAR/v2.5.2b (Dobin et al., Bioinformatics 29, 15-21 (2013)) with default settings. Aligned reads were filtered using samtools/v1.4.1 (Li et al., Bioinformatics 25, 2078-2079 (2009)) to retain reads mapped in proper pairs with quality score MAPQ>30 and to keep only the primary alignment. Duplicates were removed by picard MarkDuplicates/v2.25.2 (broadinstitute.github.io/picard/) per PCR sample. Deduplicated bam files were converted to bedpe format using bedtools/v2.30.0 (Quinlan et al., Bioinformatics 26, 841-842 (2010)), which were further converted to offset-adjusted (+4 bp for plus strand and −5 bp for minus) fragment files (.bed). Deduplicated reads were further split into constituent cellular indices by further demultiplexing reads using the Tn5 and ligation indexes. For each cell, sparse matrices counting reads falling into promoter regions (±1 kb around TSS) were also created for downstream analysis.

### Cell Filtering, Clustering and Annotation for EasySci-ATAC

[0295] SnapATAC273 (kzhang.org/SnapATAC2/index.html) was used to perform preprocessing steps for the EasySci-ATAC dataset. Cells with less than 1500 fragments and less than 2 TSS Enrichment were discarded. Potential doublet cells and doublet-derived subclusters were detected using an iterative clustering strategy (Cao, J. et al., Science 370, (2020)) modified to suit for scATAC-seq data. Briefly, cells were splitted by individual animals to overcome the large memory use when simulating doublets for the full dataset, and doublet scores were calculated using snap.pp.scrublet( ) (Wolock et al., Cell Syst 8, 281-291.e9 (2019)). Then, all cells were combined, followed by clustering and sub-clustering analysis with spectral embedding and graph-based clustering implemented in SnapATAC273 (kzhang.org/SnapATAC2/index.html). Cells labeled as doublets (defined by a doublet score cutoff of 0.2) or from doublet-derived sub-clusters (defined by a doublet ratio cutoff of 0.4) were filtered out. In addition, cells with high fragment numbers in each main cluster (defined as cells with fragments number higher than the 95th quantile within the main cluster) were also filtered out. A gene activity matrix was generated using snap.pp.make_gene_matrix( ) for the following integration analysis.

[0296] A deep-learning-based framework scJoint (Lin et al., Nat. Biotechnol. 40, 703-710 (2022)) was used to annotate main ATAC-seq cell types using the EasySci-ATAC dataset as a reference. First, 5,000 cells from each main cell type of the EasySci-RNA dataset were subsampled, and genes detected in more than 10 cells were selected. Then, the gene count matrix and cell type labels of EasySci-RNA, along with the gene activity matrix of EasySci-ATAC were input into the scJoint pipeline with default parameters. Jointed embedding layers calculated from scJoint were used for UMAP visualizations using python package umap/v0.5.3 (umap-learn.readthedocs.io/en/latest/). Cells were assigned to the prediction label with the highest abundance within each louvain cluster. Clusters with low purities (i.e., less than 80% cells were from the highest abundant cell type) were removed upon inspections. Finally, to validate the integration-based annotations, differentially expressed genes identified from the RNA-seq data were selected with the following criteria: fold change between the maximum and the second maximum expressed cell type>1.5, q-value<0.05, TPM (transcripts per million)>20 in the maximum RNA group and RPM (reads per million)>50 in the maximum ATAC group. Top 10 genes ranked by fold change between the maximum and the second maximum expressed group were selected using RNA-seq data for each cell type. If there were less than 10 genes passing the cutoff, the top genes ranked by the fold change between the maximum expressed cell type and the mean expression of other cell types were selected. The aggregated gene count and gene body accessibility (gene activity) for each cell type were calculated.

[0297] Subcluster level integrations for Microglia, OB neurons 1 and Oligodendrocytes were similar to the main cluster level integrations with mild modifications. For Microglia and OB neurons 1, all cells from the EasySci-RNA dataset were used as input for the integrations. For Oligodendrocytes, 2,000 cells from each subcluster were subsampled for integration analysis. Similarly, the subcluster level integrations were validated by inspecting the aggregated gene activity of subcluster-specific gene markers in the predicted ATAC subclusters. Subcluster marker genes were identified by differential expression analysis using scRNA-seq data and selected by the following criteria: fold change between the maximum expressed sub-cluster and the mean of all the other subclusters within the same main cell type>2, FDR<0.05, TPM (transcripts per million)>50 in the maximum expressed RNA group and RPM (reads per million)>50 in the maximum accessible ATAC group.

### Peak Calling, Peak-Based Dimension Reduction and Identifications of Differential Accessible Peaks

[0298] To define peaks of accessibility, MACS2/v2.1.176 was used. Nonduplicate ATAC-seq reads of cells from each main cell type were aggregated and peaks were called on each group separately with these parameters: --nomodel --extsize 200 --shift -100 -q 0.05. To correct for differences in read depth or the number of nuclei per cell type, MACS2 peak scores (−log 10(q-value)) were converted to ‘score per million’ (Corces, M. R. et al. Science 362, (2018)) and peaks were filtered by choosing a score-per-million cut-off of 1.3. Peak summits were extended by 250 bp on either side and then merged with bedtools/v2.30.0. Cells were determined to be accessible at a given peak if a read from a cell overlapped with the peak. The peak count matrix was generated by a custom python script with the HTseq package (Anders et al., Bioinformatics 31, 166-169 (2015)).

[0299] R package Signac/v1.7.0 (Stuart et al., Nat. Methods 18, 1333-1341 (2021)) was used to perform the dimension reduction analysis using the peak-count matrix. 5,000 cells from each main cell type were subsampled and TF-IDF normalization was performed using RunTFIDF( ), followed by singular value decomposition using RunSVD( ) and retained the 2nd to 30th dimensions for UMAP visualizations using RunUMAP( ).

[0300] Differentially accessible peaks across cell types were identified using monocle 2 (Qiu, X. et al., Nat. Methods 14, 979-982 (2017)) with the differentialGeneTest( ) function. 5,000 cells were subsampled from each cell type for this analysis. Peaks detected in less than 50 cells were filtered out. Peaks that were differentially accessible across cell types were selected by the following criteria: 5% FDR (likelihood ratio test), and with TPM>20 in the target cell type.

### Transcription Factor Motif Analysis

[0301] Chrom Var/v1.16.0 (Schep et al., Nat. Methods 14, 975-978 (2017)) was used to access the TF motif accessibility using a collection of the cisBP motif sets curated by chromVARmotifs/v0.2.0 (Schep et al., Nat. Methods 14, 975-978 (2017); github.com/GreenleafLab/chromVARmotifs). To investigate TF regulators at the main cluster level, 5,000 cells from each main cell type were subsampled, and the motif deviation score for each single cell was calculated using the Signac wrapper RunChromVAR( ). The motif deviation scores of each single cell were rescaled to (0, 10) using R function rescale( ) and then aggregated for each cell type. In addition, the gene expression of each TF in each cell type were also aggregated. The Pearson correlations between the aggregated motif matrix and aggregated TF expression matrix were then computed after scaling across all main cell types. TF analysis at the subcluster level was performed similarly with modifications. For each cell type of interest, peaks detected in more than 20 cells were selected and only cells with more than 500 reads in peaks were kept. Peaks were resized to 500 bp (±250 bp around the center) and motif occurrences were identified using matchMotifs( ) function from motifmatchr/v1.16.0 (github.com/GreenleafLab/motifmatchr). The Motif deviation matrix was calculated using the Chrom Var function computeDeviations( ). Then, the motif deviation scores were rescaled to (0, 10) and aggregated per subcluster. Pearson correlation was calculated between the aggregated motif activity and aggregated TF expression across subclusters after scaling. ATAC-seq subclusters with less than 20 cells were excluded from the correlation analysis

### Spatial Gene Expression Profiling of Mouse Brains

[0302] Spatial gene expression analysis experimental protocol was followed according to Visium Spatial Gene Expression User Guide (catalog no. CG000160), Visium Spatial Tissue Optimization User Guide (catalog no. CG000238 Rev A, 10× Genomics) and Visium Spatial Gene Expression User Guide (catalog no. CG000239 Rev A, 10× Genomics). Briefly, mice were sacrificed, and brains were extracted and frozen with liquid nitrogen. Frozen brain was embedded in OCT (Tissue TEK O.C.T compound) and cryosectioned at −15 C (Leica cryostat). Coronally placed brains were cut halfway, to place half coronally sectioned brains at 10 um on Visium tissue optimization, or gene expression analysis slides capture areas. User guide CG000160 from 10× Genomics was followed for methanol fixation and H&E stain. After fixation and staining, imaging was performed using Leica DMI8, and images were stitched using Leica Application Suite X and saved into tiff format. After tissue fixation and staining, Visium Spatial Tissue Optimization User Guide (catalog no. CG000238 Rev A, 10× Genomics) or Visium Spatial Gene Expression User Guide (catalog no. CG000239 Rev A, 10× Genomics) were followed for either protocol optimization, or gene expression analysis, respectively. Tissue optimization was performed according to CG000238, and according to optimization experiments, 18 min permeabilization provided the most optimal signal, and was followed for gene expression library preparation as well. Libraries were prepared according to Visium Spatial Gene Expression User Guide (CG000239, 10× Genomics)

### Library Preparation and Data Processing of Spatial Transcriptomics

[0303] Libraries were sequenced using a NextSeq1000 system. BCL files were converted to FASTQ, and raw FASTQ files and .tiff histology images were processed with spaceranger-1 2.2 software. Spaceranger-1.2.2 uses STAR for RNA reads genome alignment, and utilized the GRCm38 (mouse mm10) as the reference genome provided from 10× Genomics. The downstream visualization and clustering analysis of the spatial transcriptomic data following the tutorial of Seurat (satijalab.org/seurat/articles/spatial_vignette.html) was performed with default parameters.

### Spatial Transcriptomic Analysis to Locate the Spatial Distributions of Main Cell Types and Subtypes

[0304] To annotate the spatial locations of main cell types, the Easy Sci-RNA data was integrated with publicly available 10× Visium spatial transcriptomics dataset (satijalab.org/seurat/articles/spatial_vignette.html) through a non-negative least squares (NNLS) approach modified from a previous study (Cao, J. et al., Science 370, (2020)). Cell-type-specific UMI counts, normalized by the library size, multiplied by 100,000, and log-transformed after adding a pseudo-count were aggregated. A similar procedure was applied to calculate the normalized gene expression in each spatial spot captured in 10× Visium dataset. Non-negative least squares (NNLS) regression was applied to predict the gene expression of each spatial spot in 10× Visium data using the gene expression of all cell types recovered in Easy-RNA data:

$${T}_{a} = {β}_{0 a} + {β}_{1 a} {M}_{b}$$

[0305] where Tₐ and M_{b} represent filtered gene expression for target spatial spot from 10× Visium dataset A and all cell types from EasySci-RNA dataset B, respectively. To improve accuracy and specificity, cell type-specific genes were selected for each target cell type by: 1) ranking genes based on the expression fold-change between the target cell type vs. the median expression across all cell types, and then selecting the top 200 genes. 2) ranking genes based on the expression fold-change between the target cell type vs. the cell type with maximum expression among all other cell types, and then selecting the top 200 genes. 3) merging the gene lists from step (1) and (2). β₁ₐ is the correlation coefficient computed by NNLS regression.

[0306] Similarly, the order of datasets A and B were switched, and the gene expression of target cell type (T_{b}) in dataset B were predicted with the gene expression of all spatial spots (Mₐ) in dataset A:

$${T}_{b} = {β}_{0 b} + {β}_{1 b} {M}_{a}$$

[0307] Thus, each spatial spot a in 10× Visium dataset A and each cell type b in EasySci dataset B are linked by two correlation coefficients from the above analysis: β_{ab} for predicting the gene expression in each spatial spot a using b, and β_{ba} for predicting gene expression in each cell type b using a. The two values were combined by:

$$β = ( {β}_{ab} + 0.01 ) * ( {β}_{ba} + 0.01 )$$

[0308] The β is then capped to [1,3]. β reflects the cell-type-specific abundance across different spatial spots in 10× Visium datasets with high specificity. β was thus used as the alpha value (i.e., the opacity of a geom) to plot the spatial distribution of different cell types.

[0309] To characterize the expression of sub-cluster specific gene markers, the gene expression in each spatial spot of 10× Visium data was first normalized by the library size, multiplied by 100,000, and log-transformed after adding a pseudo-count. The expression of genes from sub-cluster specific gene markers was aggregated, scaled to z-score and capped to [3, 6]. Of note, the sub-cluster specific gene markers were selected by differentiation expression analysis described above and only DE genes (FDR of 5%, with a >2-fold expression difference between first and second ranked sub-clusters, expression TPM>50 in at least one sub-cluster) were selected as gene markers. In addition, the aggregated expression of the selected gene markers across all 362 sub-clusters were examined to further validate the specificity of gene markers for labeling target sub-clusters.

[0310] The Experimental Results are now described.

### a Comprehensive Cell Catalog of the Entire Mammalian Brain in Aging and AD

[0311] The EasySci method was applied to characterize cell-type-specific gene expression, and chromatin accessibility profile across the entire mouse brains sampling at different ages, sexes, and genotypes (FIG. 1c). C57BL/6 wild-type mouse brains were collected at three months (n=4), six months (n=4), and twenty-one months (n=4). To gain insight into the early molecular changes associated with the pathophysiology of AD, two AD models from the same C57BL/6 background at three months were included. These include an early-onset AD model (5×FAD) that overexpresses mutant human amyloid-beta precursor protein (APP) and human presenilin 1 (PS1) harboring multiple AD-associated mutations (Oakley, H. et al., J. Neurosci. 26, 10129-10140 (2006)); and a late-onset AD model (APOE*4/Trem2*R47H) that carries two of the highest risk factor mutations, including a humanized ApoE knock-in allele and missense mutations in the mouse Trem2 gene (Karch et al., Biol. Psychiatry 77, 43-51 (2015); jax.org/strain/028709).

[0312] Nuclei were first extracted from the whole brain, then deposited to different wells for indexed reverse transcription or transposition, such that the first index identified the originating sample and assay type of any given well. The resulting EasySci libraries were sequenced in two Illumina NovaSeq run, yielding a total of 20 billion reads (around 10 billion for each library). After filtering out low-quality cells and potential doublets, gene expression profiles in 1,469,111 single cells (a median of 70,589 cells per brain sample, FIG. 5a) and chromatin accessibility profiles in 376,309 single cells (a median of 18,112 cells per brain sample, FIG. 5b) across conditions were recovered. Despite shallow sequencing depth (˜4500 and ˜10,000 raw reads per cell for RNA and ATAC, respectively), a median of 935 UMIs (RNA) and 3,918 unique fragments (ATAC) were recovered per nucleus (FIG. 5c-d), comparable to the recently published single-cell RNA-seq and ATAC-seq datasets (Cao, J. et al., Science 370, (2020); Cao, J. et al., Nature 566, 496-502 (2019); Domcke, S. et al., Science 370, (2020)). A median of 19% of ATAC-seq reads were near a TSS (±1 kb) (FIG. 5e), comparable to the published sci-ATAC-seq3 approach (Domcke et al., Cell 174, 1309-1324.e18 (2018)).

[0313] With UMAP visualization (McInnes et al., Journal of Open Source Software vol. 3 861 (2018)), Louvain clustering (Blondel et al., Journal of Statistical Mechanics: Theory and Experiment vol. 2008 P10008 (2008)), and annotation based on cell-type-specific gene markers (Zeisel et al., Cell 174, 999-1014.e22 (2018)), 31 main cell types were identified by gene expression clusters (a median of 16,370 cells per cell type; FIG. 1g). Each cell type was observed in almost every individual (except pituitary cells were missing in three out of twenty individuals) (FIG. 6a), ranging from 0.05% (Inferior olivary nucleus neurons) to 32.5% (Cerebellum granule neurons) of the brain cell population (FIG. 1f). An average of 74 marker genes were identified for each main cell type (defined as differentially expressed genes with at least a 2-fold difference between first and second-ranked cell types with respect to expression; FDR of 5%; and TPM>50 in the target cell type). In addition to the established marker genes, many novel markers that were not previously associated with the respective cell types were identified, such as markers for microglia (e.g., Arhgap45 and Wdfy4), astrocytes (e.g., Celrr and Adamts9) and oligodendrocytes (e.g., Sec14l5 and Galnt5) (FIG. 6b).

[0314] Isoform expression was then quantified through an adapted version of the published pipeline (Booeshaghi et al., Nature 598, 195-199 (2021)). Briefly, random hexamer reads from each cell type in every individual mouse brain were merged, yielding 613 pseudocells. The merged reads were then aligned to the mouse transcriptome, resulting in 33,361 isoforms corresponding to 12,636 genes. As expected, it was found that previously identified main clusters can be resolved through isoform expression (FIG. 7a). Certain isoforms were strongly expressed in a given cell type even though their corresponding genes were not cell-type-specific. For example, App-202, an isoform of the amyloid precursor protein gene, is preferentially expressed in choroid plexus epithelial cells, while its corresponding gene is not (FIG. 7b). Similarly, Aplp2-209, an isoform of the amyloid beta precursor-like protein 2 gene, is differentially expressed in oligodendrocytes. By contrast, the cell-type-specificity is not detected at the gene level (FIG. 7c)

[0315] To reconstruct a brain cell atlas of both gene expression and chromatin accessibility, a deep learning-based strategy (Lin et al., Nat. Biotechnol. 40, 703-710 (2022)) was applied to integrate the chromatin accessibility profile of 376,309 single cells with gene expression data (FIG. 1g). As expected, the gene body accessibility and expression of marker genes across cell types were cross-validated (FIG. 1h). Furthermore, the fraction of each cell type was highly correlated between two molecular layers (FIG. 1i). To gain more insight into the epigenetic controls of the diverse cell types in the brain, peaks of accessibility within each cell type were next identified, yielding a master set of 339,951 peaks. There was a median of 34% of reads in peaks per nuclei. UMAP dimension reduction using the resulting peak count matrix readily separates main cell types, further validating the integration-based annotations (FIG. 8a). Through differential accessibility (DA) analysis, a median of 474 differential accessible peaks per cell type was identified (FDR of 5%, TPM>20 in the target cell type, FIG. 8b, c). Furthermore, key cell-type-specific TF regulators for diverse cell types were revealed by correlation analysis between motif accessibility and expression patterns (FIG. 8d), such as Spi1 in microglia (Yeh et al., Trends Mol. Med. 25, 96-111 (2019)), Nr4a2 in cortical projection neurons 3 (Watakabe et al., Cereb. Cortex 17, 1918-1933 (2007)), and Pou4f1 in inferior olivary nucleus neurons (McEvilly et al., Nature 384, 574-577 (1996))

[0316] Toward a spatially resolved brain atlas, the dataset was integrated with a 10× Visium spatial transcriptomics dataset (Ståhl et al., Science 353, 78-82 (2016)) through a modified non-negative least squares (NNLS) approach. Aggregated cell-type-specific gene expression data were used as input to decompose mRNA counts at individual spatial locations of both sagittal and coronal sections of the entire mouse brain, thereby estimating the cell-type-specific abundance across locations. As expected, specific brain cell types were mapped to distinct anatomical locations (FIG. 1j), especially for region-specific cell types such as cortical projection neurons (clusters 6,7,8), cerebellum granule neurons (cluster 3) and hippocampal dentate gyrus neurons (cluster 9). The integration analysis further confirmed the annotations and spatial locations of main cell types in the single-cell datasets.

### a Computational Framework Tailored to Characterize Cellular Subtypes in the Mammalian Brain

[0317] To investigate the molecular signatures and spatial distributions of diverse cellular subtypes in the brain, a novel computational framework tailored to sub-cluster level analysis was developed (FIG. 9a). Key steps include: (i) sub-clustering analysis by the expression of both genes and exons to increase the clustering resolution; (ii) gene module analysis to identify the signatures of main and rare cell types; (iii) spatial mapping rare cell subtypes through cell-type-specific gene module expression.

[0318] Rather than performing the sub-clustering analysis with the gene expression alone, the unique feature of EasySci-RNA (i.e., full gene body coverage) was exploited, by combining the top principal components of gene counts and exonic counts from each cell for unsupervised clustering. The added information enabled the recovery of sub-clusters with higher resolution. For example, several microglia subtypes that showed cell-type-specific exonic markers but were not easily separated by gene expression alone were identified (FIG. 10a-c). Leveraging this novel sub-clustering strategy, a total of 362 subclusters was identified, with a median of 1,030 cells in each group (FIG. 9b). All sub-clusters were contributed by at least two individuals (median of twenty), with a median of nine exonic markers enriched in each group (At least a 2-fold difference between first and second-ranked cell types with respect to expression; FDR of 5%; and TPM>50 in the target sub-cluster, FIG. 11). Some sub-cluster-specific exonic markers were not detected by conventional differential gene analysis (e.g., Map2-ENSMUSE00000443205.3, FIG. 10d). Notably, the sub-clustering strategy favors detecting extremely low-abundance cell types (FIG. 9c, d). For example, the smallest sub-cluster (choroid plexus epithelial cells-7) contained only 21 cells (0.001% of the brain population), representing rare pinealocytes in the brain based on gene markers such as Tph1 and Ddc. The second smallest sub-cluster (vascular leptomeningeal cells-2, 35 cells) represents the rare tanycytes, validated by multiple gene markers (e.g., Fndc3c1, Scn7a).

[0319] The key molecular programs underlying diverse cell subtypes was then examined by gene module analysis. Genes were clustered based on their expression variance across all 362 cell sub-clusters, revealing a total of 21 gene modules (GM) (FIG. 9e, FIG. 12). The largest gene module (GM1) corresponds to a group of housekeeping genes (e.g., ribosomal synthesis) universally expressed across all sub-clusters. Several gene modules were enriched in specific main cell types, such as an ependymal cell-specific gene module (GM11, enriched biological process: cilium movement, adjusted p-value=1.2e-26) (Kuleshov et al., Nucleic Acids Res. 44, W90-7 (2016)) (FIG. 9f). Meanwhile, gene modules that marked specific rare subtypes were detected. For example, GM9, including genes in neuropeptide signaling (e.g., Thx19, Pomc (Liu et al., Proc. Natl. Acad. Sci. U.S.A 98, 8674-8679 (2001)), was highly enriched in a subtype of pituitary cells (pituitary cells-6) corresponding to corticotropic cells (FIG. 9f). A similar analysis enabled characterization of other rare cell subtypes, including myeloid cells (Microglia sub-cluster 13, 67 cells, marked by GM19), pars tuberalis cells (Vascular leptomeningeal cells_12, 44 cells, marked by GM20), as well as aforementioned pinealocytes (choroid plexus epithelial cells sub-cluster 7, 21 cells, marked by GM2) (FIG. 12). Remarkably, rare proliferating cell types were identified through a cell-cycle-related gene module (GM6, enriched biological process: microtubule cytoskeleton organization involved in mitosis, adjusted p-value=1.2e-44) (Kuleshov et al., Nucleic Acids Res. 44, W90-7 (2016)), including proliferating cells of neurons (OB neurons 1-17, 511 cells), astrocyte (Astrocytes-7, 2,269 cells), OPCs (OPC-4, 641 cells) and microglia (Microglia-10, 82 cells) (FIG. 9f). These sub-clusters were marked by conventional proliferating markers such as Mki67, as well as a group of lncRNAs (e.g., Gm29260, Gm37065), most of which were not well-characterized in previous studies (FIG. 9g).

[0320] To spatially map the rare cell types, the expression patterns of cell-type-specific gene modules across spatial spots of the 10× Visium spatial transcriptomic datasets were next investigated (Liu et al., Proc. Natl. Acad. Sci. U.S.A 98, 8674-8679 (2001)). Strikingly, this approach enabled mapping of the anatomical locations of diverse cell types/subtypes with high accuracy. For example, ependymal cells, a critical cell type regulating cerebrospinal fluid (CSF) homeostasis, were mapped along brain ventricles as expected (FIG. 9h). Furthermore, rare proliferating cells were mapped to the subventricular zone area (FIG. 9i). A similar analysis enabled spatially mapping of other rare cell types with high resolution, including pinealocytes (CPEC_7, GM2), corticotropic cells (PC_6, GM9), pars tuberalis cells (VLC_12, GM20), tanycytes (VLC_2, GM14) and a less-characterized endothelial cell in the pituitary gland (Igfbp3− Sfn+ endothelial cells, EC_10, GM7) (FIG. 9j).

### a Global View of Mammalian Brain Cell Population Dynamics Across the Adult Lifespan at Subtype Resolution

[0321] To obtain a global view of brain cell population dynamics at timepoints across the adult lifespan, the cell-type-specific fractions recovered from cell populations in each individual mouse were quantified. Differential abundance analysis was performed across all 362 sub-clusters, yielding 45 significantly changed sub-clusters during the early growth stage (between 3 and 6 months) and 29 significantly changed sub-clusters upon aging (between 6 and 21 months; FDR of 0.05, at least two-fold change of cellular fractions, FIG. 13a). Most significantly changed cell types were consistent between male and female mice (FIG. 13b).

[0322] As expected, both main and subtypes of olfactory bulb (OB) neurons showed a significant population increase from young to adult mice (FIG. 13a, left), consistent with the expansion of the OB region in early growth (Tufo et al., Development 149, (2022)). Meanwhile, a rare astrocytes-14 subtype (Lyn+ Adgrb1+; 0.05% of the global population) and a vascular leptomeningeal cell subtype 4 (Sox10+ Mybpc1+; 0.06% of the global population) also showed substantial expansion in the same period. Strikingly, these two rare cell subtypes were spatially mapped to the same OB region based on the expression of cell-type-specific gene markers in 10× Visium spatial transcriptomic data (FIG. 13c, left), suggesting their potential roles in the OB expansion. The chromatin accessibility of these two rare cell types was further characterized, along with many OB neuron subtypes, by single-cell RNA-seq and ATAC-seq integration analysis through the deep-learning-based strategy (Lin et al., Nat. Biotechnol. 40, 703-710 (2022)) described above (FIG. 14a-c). The observed cell population dynamics can be further cross-validated by two molecular layers (i.e., RNA and ATAC) (FIG. 14d). In fact, the astrocytes-14 subtype shows a high expression of BAI1, which has been reported to be involved in the clean-up of apoptotic neuronal debris produced in the fast growth (Sokolowski et al., Brain Behav. Immun. 25, 915-921 (2011)). In addition, vascular leptomeningeal cell subtype 4 may correspond to olfactory ensheathing cells based on its high expression of Sox10 and Mybpc1 (Rosenberg et al., Science 360, 176-182 (2018); Tepe et al., Cell Rep. 25, 2689-2703.e3 (2018)).

[0323] The aging-associated cell population changes (between 6 and 21 months) were remarkably distinct from cells present in the brains during the early growth stage. Different from the global expansion of OB neurons from young to adult, most cell types remained relatively stable at the main-cluster level (less than 2-fold change between 6 and 21 months) (FIG. 13a, right). Interestingly, an age-dependent reduction of the endothelial cell population in the scRNA-seq dataset was detected (FIG. 13a). A similar but milder trend was observed in the scATAC-seq dataset (i.e., endothelial cell fractions: 0.59% in adult brains vs. 0.56% in aged brains). To better understand the region-specific changes of endothelial cells in aging, a 10× Visium spatial transcriptome dataset profiling both adult and aged mouse brains was generated. A panel of endothelial-specific gene markers not associated with aging was selected and their expression was used to estimate the effect of aging on endothelial cell density across brain regions (FIG. 15a). Consistent with the single-cell data, a globally reduced expression of endothelial markers in the spatial transcriptomic analysis of the aged brain was detected, and the reduction varied in different brain regions (FIG. 15b-c). In addition to the vascular cells, the regional-specific effects of aging for certain neuron subtypes was detected. For example, the analysis revealed an aging-associated expansion of an OB neuron subtype (OBN3-3, marked by Cpa6 and Col23a1), while another OB neuron subtypes (OBN1-11, OB neuroblasts marked by Robo2 and Prokr2 (Zeisel et al., Cell 174, 999-1014.e22 (2018); Puverel et al., J. Comp. Neurol. 512, 232-242 (2009)) were substantially depleted in aged brains. Interestingly, these subtypes were spatially mapped to different areas of the olfactory bulb (FIG. 13d), indicating a region-specific change of OB neuron subtypes upon aging. Notably, the significantly altered cellular subtypes show consistent proportion changes in male and female mice (FIG. 13b).

[0324] A marked reduction in adult neurogenesis and oligodendrogenesis was detected across the lifespan of the mammalian brain (FIG. 13d, left). For example, the most depleted populations in the aged brain include OB neuroblasts (OB neurons 1-11, marked by Prokr2 and Robo2 (Zeisel et al., Cell 174, 999-1014.e22 (2018); Puverel et al., J. Comp. Neurol. 512, 232-242 (2009)), OB neuronal progenitor cells (OB neurons 1-17, marked by Mki67 and Egfr (Pastrana et al., Proc. Natl. Acad. Sci. U.S.A 106, 6387-6392 (2009)), and DG neuroblasts (DGN-8, marked by Sema3c and Igfbpl1 (Zeisel et al., Cell 174, 999-1014.e22 (2018); Puverel et al., J. Comp. Neurol. 512, 232-242 (2009); Kumar et al., IBRO Rep 9, 224-232 (2020)). Interestingly, DG neuroblasts present with a substantial deduction even before six months, suggesting an earlier decline of DG neurogenesis compared to OB neurogenesis. In contrast to the depleted progenitor pool involved in neurogenesis, there was no detection of significant changes in proliferating oligodendrocyte progenitor cells (Cycling OPCs, OPC-4, marked by Pdgfra and Mki67 (Pastrana et al., Proc. Natl. Acad. Sci. U.S.A 106, 6387-6392 (2009); Marques et al., Dev. Cell 46, 504-517.e7 (2018)) in aging. Instead, the newly formed oligodendrocytes (OLG-6, marked by Prom1 and Tef7l1 (Pastrana et al., Proc. Natl. Acad. Sci. U.S.A 106, 6387-6392 (2009); Marques et al., Dev. Cell 46, 504-517.e7 (2018)) and a committed oligodendrocyte precursor subtype (OPC-6, marked by Bmp4 and Bcas1 (Pastrana et al., Proc. Natl. Acad Sci. U.S.A 106, 6387-6392 (2009); Marques et al., Dev. Cell 46, 504-517.e7 (2018)) show significantly reduced proportion in the aged brain, suggesting a block of oligodendrocyte differentiation upon aging. Notably, the heterogenous age-dependent change in the cell-type-specific proliferation and differentiation were further validated in the companion study, where the newly proliferated cells were labeled and their differentiation dynamics in mammalian brains across the lifespan were tracked.

[0325] The atlas of chromatin accessibility was next leveraged to identify the epigenetic controls underlying the age-dependent decline in adult neurogenesis and oligodendrogenesis. While this aforementioned integrative approach successfully identified the chromatin landscape of all main cell types, there were several substantial challenges for the sub-clustering level analysis, including the relatively lower number of profiled cells and lower resolution of the single-cell chromatin accessibility dataset compared with the single-cell transcriptome analysis. However, several cell subtypes with either high abundance or unique epigenetic signatures were recovered. For example, OB neuroblasts (OB neurons 1-11), OB neuronal progenitors (OB neurons 1-17), and newly formed oligodendrocytes (OLG-6) were identified (FIG. 16a, b), all exhibiting sharply decreased dynamics in the aged brain similar to the single-cell transcriptome analysis (FIG. 13d, right). Moreover, potential TF regulators were identified and validated by both gene expression and TF motif accessibility enriched in specific cell types, such as known regulators of neurogenesis (e.g., Sox2 and E2f2 (Graham et al., Neuron 39, 749-765 (2003); Li et al., Cereb. Cortex 28, 3278-3294 (2018)) (FIG. 13f), which further validated this integration approach for characterizing key epigenetic signatures of aging-associated cell subtypes.

[0326] In contrast to the neural progenitor cells, several cellular sub-clusters exhibited a remarkable expansion in the aged brain. For example, the most up-regulated sub-cluster in aging is a microglia sub-cluster (sub-cluster 9, Apoe+, Csf1+), corresponding to a previously reported disease-associated microglia subtype (Keren-Shaul et al., Cell vol. 169 1276-1290.e17 (2017)). In addition, a reactive oligodendrocyte subtype (OLG-7, C4b+, Serpina3n+ (Zhou et al., Nat. Med. 26, 131-142 (2020); Kenigsbuch et al., Nat. Neurosci. 25, 876-886 (2022)) significantly enriched in the aged brain was identified. With the chromatin accessibility dataset, the expansion of this cell type was confirmed (FIG. 13e, FIG. 16b, c), and its associated transcription factors were identified, including the cell-state-specific expression and motif accessibility of Stat3 (FIG. 13f), a critical regulator involved in the control of inflammation and immunity in the brain (See et al., J. Neurooncol. 110, 359-368 (2012)). By spatial transcriptomics analysis, a striking enrichment of the reactive oligodendrocyte specific markers (e.g., C4b, Serpina3n) around the subventricular zone (SVZ) was detected, a region critical for the continual production of new neurons in adulthood (FIG. 13h-g), indicating an age-related activation of inflammation signaling around the adult neurogenesis niche.

[0327] Next, the subtype-specific manifestation of key aging-related molecular signatures was explored. Differentially expressed gene analysis was performed and 7,135 aging-associated signatures across 363 sub-clusters was identified (FDR of 5%, with at least 2-fold change between aged and adult brains, FIG. 17a). 580 genes were changed across multiple (>=3) subtypes, of which 241 genes were regulated in the same direction (FIG. 17b). For example, Nr4a3, a component of DNA repair machinery and a potential anti-aging target (Paillasse et al., Med. Hypotheses 84, 135-140 (2015)), was significantly decreased only in aged neurons, including striatal neurons, OB neurons, and interneurons. Hdac4, encoding a histone deacetylase and a recognized regulator of cellular senescence (Di Giorgio et al., Genome Biol. 22, 129 (2021)), was significantly reduced only in aged astrocytes and ependymal cell subtypes. Meanwhile, the Insulin-degrading enzyme (IDE), a key factor involved in Amyloid-beta clearance (Zhang et al., Med. Sci. Monit. 24, 2446-2455 (2018)), was increased only in subtypes of neurons, including interneurons, OB neurons, interbrain, and midbrain neurons. While many of these genes have been previously reported to be associated with aging, this analysis represents the first global view of their alterations across over 300 subtypes. In addition, several non-coding RNAs that significantly changed in multiple aged subtypes were identified, most of which show high cell-type-specificity (e.g., B230209E15Rik in cortical projection neurons subtypes) but were not well-characterized before (FIG. 17b).

### A Global View of AD Pathogenesis-Associated Signatures and Subtypes

[0328] Hypothesized AD pathogenesis-associated signatures through differentially expressed gene analysis in AD mouse models were next explored. 6,792 and 7,192 sub-cluster-specific DE genes were detected in the 5×FAD (EOAD) model and the APOE*4/Trem2*R47H (LOAD) model, respectively (FIG. 18a). As expected, Apoe was significantly down-regulated across many sub-clusters in the APOE*4/Trem2*R47H mice (FIG. 18c). Meanwhile, a global change of Thy1 across many neuron types in the 5×FAD mice was detected, consistent with the fact that all transgenes introduced in the 5×FAD model were controlled under the Thy1 promoter (FIG. 18b).

[0329] Many AD-associated gene signatures exhibited remarkably concordant changes across cellular subtypes (FIG. 18b, c). For example, markers involved in unfolded protein stress (e.g., Hsp90aa1) and oxidative stress (e.g., Txnrd1) were significantly upregulated in an overlapped set of neuron subtypes in the early-onset 5×FAD mice (FIG. 18b), indicating increased stress levels and cellular damages in neurons across the brain. Meanwhile, Reln, which encodes a large secreted extracellular matrix protease involved in the ApoE biochemical pathway (Seripa et al., J. Alzheimers. Dis. 14, 335-344 (2008)), significantly decreased in multiple cell types (e.g., OB neurons, interbrain and midbrain neurons, vascular cells, oligodendrocytes) in both early- and late-onset models (FIG. 18b, c). This is consistent with previous reports that the depletion of Reln is detectable even before the onset of amyloid-β pathology in the human frontal cortex (Herring et al., J. Alzheimers. Dis. 30, 963-979 (2012)). Other interesting phenomena included the overall upregulation of Ide, a gene responsible for amyloid-β degradation, in the late-onset model similar to the aged brain (FIG. 18b, FIG. 17b), which could contribute to the delayed onset in APOE*4/Trem2*R47H mice. Less-characterized genes were identified as well. For example, Tlcd4, a gene potentially involved in lipid trafficking and metabolism (Attwood et al., Front Cell Dev Biol 9, 708754 (2021)), was significantly downregulated in thirty-five sub-clusters across broad cell types (e.g., OB neurons, Vascular cells, oligodendrocytes) in the early-onset 5×FAD mice (FIG. 18b), suggesting a potential interplay between lipid homeostasis and neurodegenerative phenotypes.

[0330] While the two AD mouse models are different in terms of genetic perturbations or disease onsets, their cell-type-specific molecular changes were surprisingly consistent. Illustrative of this, the number of DE genes per sub-cluster was highly correlated between the two models (Pearson correlation coefficient r=0.73, p-value<2.2e-16, FIG. 18d). Additionally, 559 sub-cluster-specific DE genes shared between two AD mutants was detected, such as genes involved in epilepsy (Adjusted p-value=0.02, e.g., Gria1, Med1, Plp1) (Kuleshov et al., Nucleic Acids Res. 44, W90-7 (2016)) and oxidative stress protection pathway (Adjusted p-value=0.05, e.g., Arnt, Nfe2l2) (Kuleshov et al., Nucleic Acids Res. 44, W90-7 (2016)). Intriguingly, 99% (555 of the 559) of the shared DE genes showed concordant changes in two AD mutants (Pearson correlation coefficient r=0.96, p-value<2.2e-16, FIG. 18e), indicating shared molecular programs between early- and late-onset AD models. Of note, this analysis further validates that the APOE*4/Trem2*R47H mice mutant, a mouse model recently developed, can serve as an informative model to study LOAD.

[0331] Toward a global view of AD-associated cell population dynamics, the relative fraction of sub-clusters in the two AD models was quantified for comparison with their age-matched wild-type controls (3-month-old). 16 and 14 significantly changed sub-clusters was detected (FDR of 5%, at least two-fold change) in the EOAD (5×FAD) model and LOAD (APOE*4/Trem2*R47H) model, respectively (FIG. 18f, Table 1 and Table 2). Most significantly altered subtypes showed consistent proportion changes in male and female mice (FIG. 18g). Interestingly, while these two AD mutants involved different genetic perturbations, the significantly altered cell subtypes were highly concordant (FIG. 18h). For example, a rare choroid plexus epithelial cell subtype (CPEC-4, 0.018% of the total brain cell population) was strongly depleted in both AD models. This cell type is marked by significant enrichment of mitochondrial genes, including mt-Rnr1, mt-Rnr2, mt-Col, mt-Cytb, mt-Nd1, mt-Nd2, mt-Nd5, and mt-Nd6. Some of these mitochondrial genes (e.g., mt-Rnr2) have been associated with synthesizing neuroprotective factors against neurodegeneration by suppressing apoptotic cell death (Hashimoto et al., Proc. Natl. Acad. Sci. U.S.A 98, 6336-6341 (2001)); others (e.g., mt-Rnr1 and mt-Nd5) were reported to be related to the phosphorylated Tau protein levels in cerebrospinal fluid (Cavalcante et al., Biomedicines 10, (2022)). While this cell type was only rarely identified in the single-cell ATAC data, it was possible to map the cell subtype to the subventricular zone by the expression of cell-type-specific markers in the spatial transcriptomics data (FIG. 18i-j). Consistent with the scRNA data, this cell type was strongly depleted in the spatial transcriptomic profiling of the EOAD (5×FAD) model (FIG. 18j), suggesting a potential interplay between cell-type-specific mitochondrial functions and neurodegenerative phenotypes. By contrast, another interbrain and midbrain neuron subtype (IMN 1-13, Col25a+ Ndrg1+) expanded considerably in both AD models (FIG. 18h). This subtype is marked by the expression of Col25a, a membrane-associated collagen that has been reported to promote intracellular amyloid plaque formation in mouse models (Tong et al., Neurogenetics 11, 41-52 (2010)). Indeed, an up-regulation of IMN 1-13 specific gene markers was identified in the thalamus region of the 5×FAD mouse brain (FIG. 18i-j), further validating the single-cell transcriptome analysis.

TABLE 1
Differentially abundant sub-clusters between wild type and LOAD model.

| | | Log2(Fold | Number | |
|---|---|---|---|---|
| Cell sub-cluster | Q-value | change) | of cells | Final change |
| Bergmann glia_2 | 0.001741648 | −1.001068724 | 881 | Downregulated |
| Cerebellum granule neurons_15 | 0.002539487 | −1.001599879 | 1421 | Downregulated |
| Cerebellum granule neurons_4 | 2.00E−26 | −1.067525696 | 34921 | Downregulated |
| Choroid plexus epithelial cells_4 | 6.91E−26 | −2.028294359 | 168 | Downregulated |
| Hindbrain neurons 2_4 | 7.64E−13 | −1.167696006 | 309 | Downregulated |
| Unipolar brush cells_2 | 0.002539487 | −1.204448696 | 146 | Downregulated |
| Choroid plexus epithelial cells_6 | 0.000634928 | 1.46049498 | 159 | Upregulated |
| Cortical projection neurons 1_17 | 7.70E−07 | 1.107595437 | 527 | Upregulated |
| Cortical projection neurons 1_23 | 5.76E−22 | 1.079606112 | 1506 | Upregulated |
| Cortical projection neurons 2_13 | 1.62E−06 | 1.105967385 | 442 | Upregulated |
| Interbrain and midbrain neurons 1_13 | 1.38E−15 | 1.990360624 | 296 | Upregulated |
| Interbrain and midbrain neurons 1_9 | 2.43E−05 | 1.770493437 | 136 | Upregulated |
| Interbrain and midbrain neurons 2_15 | 1.88E−07 | 1.17960744 | 208 | Upregulated |
| Interbrain and midbrain neurons 2_24 | 1.57E−05 | 1.188554014 | 396 | Upregulated |
| Interbrain and midbrain neurons 2_9 | 5.22E−21 | 1.104598658 | 1823 | Upregulated |
| Microglia_9 | 5.97E−09 | 1.951669875 | 75 | Upregulated |

TABLE 2
Differentially abundant sub-clusters between wild type and LOAD model.

| | | Log2(Fold | Number | |
|---|---|---|---|---|
| Cell sub-cluster | Q-value | change) | of cells | Final change |
| Choroid plexus epithelial cells_4 | 2.96E−26 | −1.525231318 | 204 | Downregulated |
| Cerebellum granule neurons_10 | 3.67E−115 | 1.206897519 | 8030 | Upregulated |
| Choroid plexus epithelial cells_1 | 1.38E−07 | 1.241757141 | 817 | Upregulated |
| Choroid plexus epithelial cells_5 | 0.019996558 | 1.130589882 | 84 | Upregulated |
| Choroid plexus epithelial cells_6 | 5.65E−11 | 1.948657495 | 346 | Upregulated |
| Ependymal cells_3 | 5.59E−14 | 1.382951706 | 423 | Upregulated |
| Interbrain and midbrain neurons 1_13 | 6.60E−07 | 1.079062043 | 321 | Upregulated |
| Interbrain and midbrain neurons 2_9 | 2.92E−20 | 1.019011372 | 2775 | Upregulated |
| Oligodendrocytes_10 | 5.18E−57 | 1.932849872 | 1919 | Upregulated |
| Striatal neurons 1_4 | 3.22E−33 | 1.267727954 | 2905 | Upregulated |
| Striatal neurons 2_1 | 2.60E−17 | 1.586281252 | 596 | Upregulated |
| Striatal neurons 2_2 | 3.16E−08 | 1.497962393 | 234 | Upregulated |
| Striatal neurons 2_4 | 4.39E−09 | 1.462076289 | 210 | Upregulated |
| Vascular leptomeningeal cells_10 | 0.001701393 | 1.143721078 | 228 | Upregulated |

[0332] Finally, a significant expansion of disease-associated ApoE+ Csf1+ microglia-9 subtype was detected in the early-onset 5-FAD mice, similar to the aged mice, consistent with previous reports (Keren-Shaul et al., Cell vol. 169 1276-1290.e17 (2017)). This cell type was not enriched in the late-onset APOE*4/Trem2*R47H model (3-month-old), indicating a correlation between the reactive microglia with disease onset (FIG. 18k). Consistent proportion changes were detected with the chromatin accessibility dataset (FIG. 18k). To further delineate the transcriptional control of microglia differentiation, 199 genes differentially expressed in the reactive microglia subtype were identified, many of which (44%) can be validated by the promoter accessibility (FIG. 15d). In addition, key transcription factors validated by both cell-type-specific gene expression and motif accessibility were identified (FIG. 18l), including TFs of the NF-kappa B signaling pathway (e.g., Nfkb1 and Relb (Oeckinghaus et al., Cold Spring Harb. Perspect. Biol. 1, a000034 (2009)) and TFs involved in oxidative stress protection (e.g., Nfe2l2 (Liu et al., Aging Cell 16, 934-942 (2017)), and cholesterol homeostasis (e.g., Srebf2 (Bommer et al., Cell Metab. 13, 241-247 (2011)), reflecting potential regulatory roles of these molecular pathways in microglia specification.

### Example 2: EasySci-RNA Protocol

[0333] Single-cell combinatorial indexing (‘sci-’) is a methodological framework that employs split-pool barcoding to uniquely label the nucleic acid contents of large numbers of single cells or nuclei. Although much progress has been made in making combinatorial indexing methods more efficient, easier to perform, and less costly, there are still major shortcomings in these high-throughput RNA-sequencing techniques. To address this, a new 3-level sci-RNA-seq method (EasySci-RNA) was employed which includes optimizations that drastically improve efficiency, lower cost per cell sequenced, and increased gene body coverage compared to the previous iteration of the method (sci-RNA-seq3).

### The Protocol Workflow is as Follows:

[0334] Buffer Preparation (Steps 1-12)
[0335] Ligation Primer Annealing (Steps 13-16)
[0336] Tn5 loading (Step 17)
[0337] Nuclei Extraction (˜2.5 hrs for 6 samples) (Steps 18-26)
[0338] Nuclei Wash (˜15-30 mins for 6-30 samples) (Steps 27-28)
[0339] Nuclei Counting (Step 29)
[0340] Reverse Transcription (˜1-2.5 hrs depending on the number of samples) (Steps 30-33)
[0341] Pool/Centrifuge/Resuspend/Redistribute (15 m) (Steps 34-35)
[0342] Ligation (˜2 hrs) (Steps 36-40)
[0343] Pool/Centrifuge/Resuspend/Redistribute/Quantify (30 m) (Steps 41-45)
[0344] Second-Strand Synthesis (˜1.25 hrs) (Steps 46-48)
[0345] 0.8× Ampure Beads Purification (˜1 hr) (Steps 49-55)
[0346] Tagmentation (˜10 mins) (Steps 56-57)
[0347] SDS Treatment (˜1.5 hrs) (Steps 58-61)
[0348] PCR (45 m) (Step 62)
[0349] Library Purification (˜1 hr) (Steps 63-74)
   It is important to start with a species-mixing experiment for validating the experimental setup is working-normally mixture of human (HEK293T) and mouse (NIH/3T3) cells. A good run normally yields single-cell transcriptomes with over 5000 UMIs (with over 20,000 sequencing reads) per cell and >98% purity.

### Required Equipment:

[0350] Bioruptor Sonication Device
[0351] Hemocytometers (Neubauer Improved, Bulldog Bio VWR #102966-632) Centrifuge (Eppendorf 5702 RH)
[0352] DynaMag-96 Side Skirted Magnet (Invitrogen, 12027)/DynaMag-96 Side Magnet (Invitrogen, 12331D)
[0353] 12-tube Magnetic Separation Rack (NEB, S1509S)
[0354] Eppendorf Mastercycler (4×)
[0355] Freezer (−20 C, −80 C) and Refrigerator (4 C)
[0356] Gel Box
[0357] Gel Imager
[0358] Ice Buckets
[0359] Microscope
[0360] Multi-channel Pipettes (2-20 μL, 20-200 μL) (Rainin Instruments)
[0361] NextSeq 500 Platform (Illumina)
[0362] Pipettors
[0363] 96 well Pipetting System
[0364] Liquid nitrogen tank for sample storage
[0365] FreezeCell Cell Freezing Container (GeneSeeSci, catalog number: 27-802) Eppendorf ThermoMixer C (5382000023) OR Fisherbrand Nutating Mixer (88861043)

### Primer Sequences

[0366] All primer sequences including RT/Ligation/PCR primers are provided in Tables 3-6. All primers are ordered from IDT with standard desalting.

### List of Materials Used

[0367] Nuclease free water (Ambion, AM 9937)
[0368] 10 cm cell culture dish (Genesee, 25-202)
[0369] 6 cm cell culture dish (Genesee, 25-260)
[0370] OEMTOOLS 25181 Razor Blades, 100 Pack (VWR, 55411-0055)
[0371] Ward's 40 um Sterile Cell Strainer (VWR, 470236-276)
[0372] PluriStrainer Mini 40 um (PluriSelect 43-10040-70)
[0373] PluriStrainer Mini 20 um (PluriSelect 43-10020-70)
[0374] PluriStrainer Mini 5 um (PluriSelect 43-10005-70)
[0375] BD New STERILE, Sealed, 5 ML Syringes Only LUER Lock TIP, No Needle, Disposable (VWR, BD309646)
[0376] Pierce 16% Formaldehyde, Methanol Free (Thermofisher, 28906)
[0377] SUPERase In RNase Inhibitor 20 U/uL (Thermo Fisher Scientific, AM2696) BSA 20 mg/ml (NEB, B9000S)
[0378] 1M Tris-HCl (pH 7.5) (Thermo Fisher Scientific, 15567027)
[0379] 5M NaCl (Thermo Fisher Scientific, AM9759)
[0380] 1M MgCl₂ (Thermo Fisher Scientific, AM9530G)
[0381] TE Buffer (IDTE, Nov. 5, 2001-05)
[0382] Dimethylformamide, 99.8% (Fisher Scientific, AC327175000)
[0383] Dimethyl Sulfoxide (VWR, 97063-136)
[0384] Nuclei Isolation Kit: Nuclei EZ Prep (Millipore Sigma, NUC101-1KT)
[0385] Diethyl Pyrocarbonate (DEPC) (VWR, 97062-652)
[0386] PBS, 1× (Genesee, 25-507)
[0387] Triton X-100 for molecular biology (Sigma Aldrich, 93443-100ML)
[0388] 10 mM dNTP (Thermo Fisher Scientific, R0192)
[0389] 192 indexed shortdT primers (100 μM, 5′-(SEQ ID NO: 2413)/5Phos/ACGACGCTCTTCCGATCTNNNNNNNN [10 bp barcode] TTTTTTTTTTTTTTTT-3′ (SEQ ID NO:2414), where “N” is any base; IDT)
[0390] 192 indexed randomN primers (100 μM, 5′-/5Phos/ACGACGCTCTTCCGATCTNNNNNNNN (SEQ ID NO:2447) [10 bp barcode] NNNNNN-3′, where “N” is any base; IDT)
[0391] Maxima H Minus Reverse Transcriptase with Buffer (ThermoFisher, EP0753) T4 DNA Ligase (NEB, M0202L)
[0392] EDTA 0.5M Solution (VWR, 97062-656)
[0393] 384 indexed ligation primers (100 μM, 5′-(SEQ ID NO: 2415) AATGATACGGCGACCACCGAGATCTACAC [10 bp barcode] ACACTCTTTCCCTAC-3′ (SEQ ID NO:2416))
[0394] Adapter Primer (100 μM, 5′-
[0395] A*G*A*T*C*G*G*A*A*G*A*G*C*G*T*C*G*T*G*T*A*G*G*G*A*A*A*G*A*G*T*G*T*/3ddC/) (SEQ ID NO: 2445) Elution buffer (Qiagen, 19086)
[0396] NEBNext® Ultra II Non-Directional RNA Second Strand Synthesis Module (NEB, E7550S) Nextera N7 adaptor loaded Tn5 (provided by Illumina) OR Custom Tn5
[0397] DNA binding buffer (Zymo Research, D4004-1-L)
[0398] AMPure XP beads (Beckman Coulter, A63882)
[0399] SDS, 20% Solution, RNase Free (ThermoFisher AM9820)
[0400] Tween 20 (Millipore Sigma, P9416-100ML)
[0401] Ethanol (Sigma Aldrich, 459844-4L)
[0402] 10 μM Universal P5 primer ((SEQ ID NO: 2446) 5′-AATGATACGGCGACCACCGAGATCTACAC-3′, IDT) 10 μM P7 primer ((SEQ ID NO:2417) 5′-CAAGCAGAAGACGGCATACGAGAT [17] GTCTCGTGGGCTCGG-3′ (SEQ ID NO: 2418), IDT) NEBNext High-Fidelity 2× PCR Master Mix (NEB, M0541L)
[0403] Qubit dsDNA HS kit (Invitrogen, Q32854)
[0404] Qubit tubes (Invitrogen, Q32856)
[0405] E-Gel EX Agarose Gel, 2% (ThermoFisher, G402002)
[0406] E-Gel 50 bp DNA Ladder (ThermoFisher, 10488099)
[0407] Nextseq V2 75 cycle kit (Illumina, FC-404-2005)
[0408] Falcon Tubes, 15 ml (VWR Scientific, 21008-936)
[0409] Falcon Tubes, 50 ml (VWR Scientific, 21008-940)
[0410] Green pack LTS 200 ul filter tips (GP-L200F) (Rainin Instrument, 17002428)
[0411] Pipette Tips RT LTS 20 uL FL 960A/10 (Rainin, 30389226)
[0412] Pipette Tips RT LTS 200 μL F 960/10 (Rainin, 30389239)
[0413] Pipette Tips RT LTS 200 μL FLW 960A/10 (Rainin, 30389241)
[0414] 4-Chip Disposable Hemocytometers, Neubauer Improved, Bulldog Bio (VWR, 102966-632)
[0415] DNA LoBind Tube 1.5 ml, PCR clean (Eppendorf North America, 22431021)
[0416] 1.0 mL Self-Standing Cryovial (GeneSeeSci, catalog number: 24-200P)
[0417] LoBind clear, 96-well PCR Plate (Eppendorf North America, 30129512)
[0418] 0.2 mL 8-Strip Tubes with Individual Caps (PCR Tubes) (Genesee, 27-125U)
[0419] Reagent reservoirs (Fisher Scientific, 07-200-127)
[0420] Falcon® 5 mL Round Bottom w/Cell Strainer (Fisher Scientific, 352235)
[0421] eXTReme FoilSeal Film (Genesee, 12-156)
[0422] eXTReme Clear Sealing Film (Genesee, 12-157)

### Buffer Preparation

[0423] 500 mL Nuclei Buffer (Stored in 4 C)
[0424] 10 mM Tris-HCl, pH 7.5; 10 mM NaCl; 3 mM MgCl2 in nuclease free water:

| | Stock | Final | Volume |
|---|---|---|---|
| Reagent | concentration | concentration | (ml) |
| Tris-HCl (pH 7.5) | 1M | 10 mM | 5 |
| NaCl | 5M | 10 mM | 1 |
| MgCl2 | 1M | 3 mM | 1.5 |
| Nuclease-free | | NA | 492.5 |
| water NA | | | |
| Final volume | | | 500 |

[0425] Filter the buffer through a 0.22 uM filter and store the buffer in 4 C for up to 1 year.
[0426] 20 mL 10% (volume) Triton-X-100 in nuclease-free water (stored in 4 C)
[0427] Add 2 mL Triton X-100 to 18 mL nuclease-free water. Mix the solution by pipetting up and down 20 times. The mix can be stored in 4 C for up to 1 year.
[0428] EZ Lysis Buffer+0.1% RNase Inhibitor (Made fresh each time, stored on ice, 2 mL per tissue sample)
[0429] EZ lysis buffer with 0.1% (volume) SUPERase In RNase Inhibitor (20U/μL, Ambion). For each sample, combine 2 mL EZ lysis buffer and 2 μL SUPERase In RNase Inhibitor (20U/μL, Ambion).
[0430] EZ Lysis Buffer+1% DEPC (Made fresh each time, stored on ice, DEPC added just before lysis step, 1 mL per tissue sample)
[0431] EZ Lysis buffer with 1% (volume) DEPC. For each sample, combine 990 μL EZ lysis buffer and 10 μL DEPC
[0432] Nuclear Suspension Buffer (NSB) (Made fresh each time, stored on ice)
[0433] Nuclei Buffer with 1% SUPERase In RNase Inhibitor (20U/μL, Ambion) and 1% BSA (20 mg/mL, NEB): For every 1 mL NSB needed, combine 980 μL Nuclei Buffer, 10 μL SUPERase In RNase Inhibitor (20U/μL, Ambion), and 10 μL BSA (20 mg/mL, NEB).
[0434] Nuclear Suspension Buffer+10% DMSO (NSB+10% DMSO) (Made fresh each time, 100 μL needed per sample aliquot, stored on ice)
[0435] For every 1 mL needed, add 900 μL Nuclear Buffer and 100 μL DMSO.
[0436] Nuclear Suspension Buffer+0.1% Triton-X-100 (NSB+Triton) (Made fresh each time, 750 μL needed per sample, stored on ice)
[0437] For every 1 mL needed, add 990 μL Nuclei Buffer and 10 μL 10% Triton-X-100.
[0438] Nuclear Buffer+1% BSA+0.1% Triton-X-100 (NBB) (Made fresh each time, ˜8 mL needed, store on ice)
[0439] Add 7.84 mL Nuclei Buffer, 80 μL BSA (20 mg/mL, NEB), and 80 μL 10% Triton-X-100.
[0440] 0.1% Formaldehyde in PBS (Made fresh each time, 1 mL needed per sample, store on ice)
[0441] For every 1 mL solution needed, add 1 mL PBS and 6.25 μL 16% Formaldehyde (Using 1 mL glass vial of 16% formaldehyde: open and use a fresh tube of formaldehyde each time)
[0442] 2× Tagmentation Buffer (Stored in −20 C)
[0443] Prepare 200 mL of Tagmentation Buffer (filtered):
   [0444] 1M Tris HCl (pH 7.5): 4 mL
   [0445] 1M MgCl2: 2 mL.
   [0446] DMF: 40 mL
   [0447] H2O: add to 200 ml (˜154 mL)
[0448] Aliquot the solution into 15 mL or 1.5 mL tubes
[0449] 1% SDS (Store at room temperature)
[0450] Mix 1 mL 10% SDS (brand, catalog #) and 9 mL H2O
[0451] 10% Tween-20 (Store in 4 C)
[0452] Mix 1 mL Tween-20 and 9 mL H2O, let sit for 10 minutes before mixing again. Repeat until the solution is homogenous.

### Ligation Primer Loading (1 h)

[0453] Resuspend and dissolve the Ligation Adaptor Primer Oligo to 100 μM in TE Buffer
[0454] In each well of an empty 96-well plate, add 5 μL of 100 μM dissolved Ligation Adaptor Primer and 5 μL 100 μM Barcoded Ligation Primers-make sure to add the Barcoded Ligation Primers to their correct wells
[0455] Anneal the adaptor and ligation primers together by running the following thermocycler program:
   [0456] 95 C for 2 minutes
   [0457] Cool to 20 C at a rate of −1 C per minute
   [0458] Hold at 4 C
[0459] The final annealed concentration will be 50 μM.
[0460] Dilute the primers to 3.125 μM by adding 150 μL of EB buffer. The resulting product is in stable, double-stranded form and can be stored at 4 C or frozen. In 4 C, the annealed primers should be stable for roughly three months and is suitable for short-term testing experiments.

### Tn5 Loading (1 h)

[0461] Protocol Derived from Hennig et al. 2018, Large-Scale Low-Cost NGS Library Preparation Using a Robust Tn5 Purification and Tagmentation Protocol-purified Tn5 protein is also from this publication.
[0462] The Tn5 loading protocol is derived from Hennig et al. 2018, Large-Scale Low-Cost NGS Library Preparation Using a Robust Tn5 Purification and Tagmentation Protocol. Their purified Tn5 protein was used. The procedure is listed below: 150 μL of 100 μM Tn5-ME-B oligo (5′-GTCTCGTGGGCTCGGAGATGTGTATAAGAGACAG-3′ (SEQ ID NO:2450), in TE buffer) was mixed with 150 μL of 100 μM Tn5MErev oligo (-/5′Phos/CTGTCTCTTATACACATCT-3′ (SEQ ID NO:2451), in TE buffer) reaching a final concentration of 50 μM. Then, the mixture was split into aliquots and the following thermocycler conditions was performed: 95 C for 5 minutes, slowly cooled to 65 C (0.1 C/sec or 2%), 65 C for 5 minutes, slowly cooled to 4 C (0.1 C/sec or 2%). The mixture was further diluted to 35 μM by mixing 10 μL of the oligo mixture with 4.28 μL of TE buffer. Then, 1 μL of the Tn5 enzyme at 4 mg/mL was combined with 19 μL of Tn5 Dilution Buffer (25 mM Tris pH 7.5, 800 mM NaCl, 0.1 mM EDTA, 1 mM DTT and 50% glycerol) and 2 μL of the 35 μM Tn5-ME-B/Tn5-MErev oligo mixture. This solution was placed on a thermomixer at 23 C for 30 minutes and diluted with 22 μL of glycerol and stored at −20 C for future usage.
[0463] Alternatively, use Nextera N7 loaded Tn5 from Illumina or Commercial Tn5 from Diagenode or another alternative

### Nuclei Extraction (˜2.5 hrs for 6 Samples)

[0464] Cool centrifuge to 4 C—make sure to use a bucket centrifuge for all centrifuging steps unless otherwise stated, as normal centrifuges may have difficulty making a neat pellet at the bottom of the tube, which is necessary to maximize nuclear recovery.
[0465] In a 6 cm dish on ice, cut each tissue section (0.1 g-0.5 g) into small pieces (<1 mm3) using a razor blade and 1 mL PBS with 10 μL DEPC added. Transfer the tissue and solution into a 1.5 mL tube and spin for 5 minutes at 200 g at 4 C.
[0466] *Make sure to add DEPC just before performing lysis, as DEPC has a short half-life in aqueous solutions*
[0467] *Perform this step in a fume hood, as chopping tissue in a DEPC solution may be toxic* *For larger tissue samples, may want to split into multiple 1.5 mL tubes to make pipetting the samples easier*
[0468] *Ideally, the tissue sections do not thaw until the sections are being cut in the DEPC-PBS solution. To prevent thawing, have a separate container filled with dry ice to place the sections that are currently not being minced with the razor blade*
[0469] *Generally, a maximum of six tissue sections is worked with at one time—it is theoretically possible to process more at the same time, but it may be difficult to manage*
[0470] Dump Supernatant
[0471] Add 1 mL ice-cold EZ lysis buffer+1% DEPC to the tissue for nuclei extraction. Pipet the tissue up and down with a 1 mL pipet tip 10 times (cut the top of 1 mL pipet tip if needed for easier pipetting). Incubate on ice for 5 minutes.
[0472] *Make sure to add DEPC just before performing lysis, as DEPC has a short half-life in aqueous solutions and will degrade if not added immediately before lysis*
[0473] *From this point on, use 1 mL pipet tips or wide bore tips when working with nuclei to avoid stress on nuclei*
[0474] Filter tissue with a 40 μm cell strainer into a 6 cm dish and grind tissue on the strainer using a 5 ml syringe plunger. Add 500 μL EZ Lysis Buffer+0.1% RNase Inhibitor and continue grinding tissue on the strainer. Move solution into a 1.5 mL microcentrifuge tube.
[0475] *It is not necessary to push the whole tissue through the filter! Make sure not to tear through the filter!*
[0476] Pellet the nuclei by centrifuging for 5 minutes, 500 g at 4 C. Dump supernatant. Resuspend each tube in 500 μL EZ Lysis Buffer+0.1% RNase Inhibitor by pipetting up and down three times.
[0477] Pellet the nuclei by centrifuging for 5 minutes, 500 g at 4 C. Dump supernatant.
[0478] Fixation: Take each tube and add 1 mL of ice-cold 0.1% Formaldehyde suspended in PBS. Start a 10-minute timer immediately after formaldehyde is added. Mix up and down to resuspend the pellet.
[0479] For multiple samples, add 1 mL directly to the top of tubes without changing tips and without touching the tubes; start timer once the first mL of formaldehyde is added and add to all tubes. Once done, go back and pipet up and down the solution in each sample to resuspend the pellet, making sure to switch tips for each sample.
[0480] *Perform this step in a fume hood as formaldehyde is toxic*.
[0481] Pellet the nuclei immediately afterward by centrifuging for 3 minutes, 500 g at 4 C. Dump supernatant in a chemical waste container. Resuspend each tube in 500 μL EZ Lysis Buffer+0.1% RNase Inhibitor by pipetting up and down three times.
[0482] Pellet the nuclei by centrifuging for 5 minutes, 500 g at 4 C. Dump supernatant. Resuspend each tube in 500 μL EZ Lysis Buffer+0.1% RNase Inhibitor by pipetting up and down three times.
[0483] PERFORM THIS STEP IF THERE IS A DESIRE TO STORE NUCLEI FOR LATER USE—OTHERWISE, SKIP TO THE SECOND PART OF THE NEXT STEP:
[0484] Pellet the nuclei by centrifuging for 5 minutes, 500 g at 4 C. Resuspend each tube in 100-500 μL NSB+10% DMSO and split into 100 μL aliquots. Slow freeze in a −80 C freezer and keep for storage. Optimally, use specialized slow-freezing chambers with 1.0 mL Self-Standing Cryovials (FreezeCell Cell Freezing Container, GeneSeeSci, catalog number: 27-802) (1.0 mL Self-Standing Cryovial, GeneSeeSci, catalog number: 24-200P) (STOP POINT).
   Nuclei Wash (˜15-30 minutes for 6-30 Samples)
[0485] 1) PERFORM BELOW IF YOU ARE WORKING WITH PREVIOUSLY FROZEN, STORED NUCLEI:
[0486] Thaw cells for 30 seconds in a 37 C water bath. Add 400 μL NSB+Triton to each sample to resuspend pellet, and then sonicate for 12 seconds at low power. After, filter nuclei through a 20 um filter. Wash the filter with an additional 250 μL NSB+Triton and then pellet the nuclei for 5 minutes, 500 g at 4 C.
[0487] 2) PERFORM BELOW IF DIRECTLY CONTINUING FROM NUCLEI EXTRACTION:
[0488] Add 500 μL NSB+Triton to each sample to resuspend pellet, and then sonicate for 12 seconds at low power. After, filter nuclei through a 20 um filter. Wash the filter with an additional 250 μL NSB+Triton and then pellet the nuclei for 5 minutes, 500 g at 4 C.
[0489] Resuspend the pellet in 100 μL of NSB.

### Nuclei Counting

[0490] Count the concentration for each sample.

[0491] A buffer with DAPI and a fluorescent microscope can be used to distinguish between actual nuclei and debris. To make the buffer, dissolve 10 mg DAPI in 2 ml of deionized water (dH2O) with a final concentration of 5 mg/ml Split the DAPI solution into multiple tubes (100 ul per tube). Take out one tube (100 μl, 5 mg/ml DAPI), add 1.9 ml deionized water (dH2O). Split the diluted DAPI solution into multiple tubes (100 ul per tube, 0.25 mg/ml DAPI). Store the DAPI solution in a common box in −20 C freezer.

[0492] Make the DAPI counting solution: in 500 μL of Nuclei Buffer, add 0.5 μL-1 μL of 0.25 mg/mL DAPI solution Take 1 μL of the sample and combine it with 9 μL of the counting solution. Mix the solution and take 6 μL to dispense into a hemocytometer.

### Reverse Transcription (˜1-2.5 hrs Depending on Number of Samples)

[0493] For each well of 2×96 well plates, add a maximum of 20,000 nuclei in 4 μL of NSB; also add 0.5 μL of 10 mM dNTP.
   [0494] a. *Nuclei generally distributed into PCR strips and then distributed into wells—make sure not to pipet up and down to avoid nuclei lysis*
   [0495] b. *To mix before distribution, use wide bore multichannel tips*
[0496] Add 1 μL 50 μM short-dT primer (Table 3) and 1 μL 50 μM randomN primer (Table 4). Incubate plates at 55 C for 5 minutes. Immediately place plates on ice afterward.
   [0497] a. *Again, try to avoid pipetting up and down*
[0498] Prepare the reverse transcription reaction mix by combining:
[0499] 5× Maxima Buffer: 420 μL
[0500] Maxima Reverse Transcriptase: 105 μL
[0501] SUPERase In RNase Inhibitor: 105 μL.
[0502] Nuclease Free H2O: 105 μL
   [0503] a. Add 3.5 μL to each well for each of the plates, pipet up and down only once
[0504] Start the reverse transcription with the following thermocycler program:
   [0505] 4 C for 2 minutes
   [0506] 10 C for 2 minutes
   [0507] 20 C for 2 minutes
   [0508] 30 C for 2 minutes
   [0509] 40 C for 2 minutes
   [0510] 50 C for 2 minutes
   [0511] 55 C for 15 minutes

TABLE 3
Short dT reverse transcription (RT) primer sequences

| | | SEQ ID | | SEQ ID |
|---|---|---|---|---|
| Name | Sequence | NO: | Barcode | NO: |
| shortDT_plate1_01 | /5Phos/ACGACGCTCTTCCGATCTNNNNNNNNTTCTCGCATGT | 1 | TTCTCGCATG | 193 |
| | TTTTTTTTTTTTTT | | | |
| shortDT_plate1_02 | /5Phos/ACGACGCTCTTCCGATCTNNNNNNNNTCCTACCAGTT | 2 | TCCTACCAGT | 194 |
| | TTTTTTTTTTTTTT | | | |
| shortDT_plate1_03 | /5Phos/ACGACGCTCTTCCGATCTNNNNNNNNGCGTTGGAGCT | 3 | GCGTTGGAGC | 195 |
| | TTTTTTTTTTTTTT | | | |
| shortDT_plate1_04 | /5Phos/ACGACGCTCTTCCGATCTNNNNNNNNGATCTTACGCT | 4 | GATCTTACGC | 196 |
| | TTTTTTTTTTTTTT | | | |
| shortDT_plate1_05 | /5Phos/ACGACGCTCTTCCGATCTNNNNNNNNCTGATGGTCAT | 5 | CTGATGGTCA | 197 |
| | TTTTTTTTTTTTTT | | | |
| shortDT_plate1_06 | /5Phos/ACGACGCTCTTCCGATCTNNNNNNNNCCGAGAATCCT | 6 | CCGAGAATCC | 198 |
| | TTTTTTTTTTTTTT | | | |
| shortDT_plate1_07 | /5Phos/ACGACGCTCTTCCGATCTNNNNNNNNGCCGCAACGAT | 7 | GCCGCAACGA | 199 |
| | TTTTTTTTTTTTTT | | | |
| shortDT_plate1_08 | /5Phos/ACGACGCTCTTCCGATCTNNNNNNNNTGAGTCTGGCT | 8 | TGAGTCTGGC | 200 |
| | TTTTTTTTTTTTTT | | | |
| shortDT_plate1_09 | /5Phos/ACGACGCTCTTCCGATCTNNNNNNNNTGCGGACCTAT | 9 | TGCGGACCTA | 201 |
| | TTTTTTTTTTTTTT | | | |
| shortDT_plate1_10 | /5Phos/ACGACGCTCTTCCGATCTNNNNNNNNACCTCGTTGAT | 10 | ACCTCGTTGA | 202 |
| | TTTTTTTTTTTTTT | | | |
| shortDT_plate1_11 | /5Phos/ACGACGCTCTTCCGATCTNNNNNNNNACGGAGGCGG | 11 | ACGGAGGCGG | 203 |
| | TTTTTTTTTTTTTTT | | | |
| shortDT_plate1_12 | /5Phos/ACGACGCTCTTCCGATCTNNNNNNNNTAGATCTACTT | 12 | TAGATCTACT | 204 |
| | TTTTTTTTTTTTTT | | | |
| shortDT_plate1_13 | /5Phos/ACGACGCTCTTCCGATCTNNNNNNNNAATTAAGACTT | 13 | AATTAAGACT | 205 |
| | TTTTTTTTTTTTTT | | | |
| shortDT_plate1_14 | /5Phos/ACGACGCTCTTCCGATCTNNNNNNNNCCATTGCGTTT | 14 | CCATTGCGTT | 206 |
| | TTTTTTTTTTTTTT | | | |
| shortDT_plate1_15 | /5Phos/ACGACGCTCTTCCGATCTNNNNNNNNTTATTCATTCTT | 15 | TTATTCATTC | 207 |
| | TTTTTTTTTTTTT | | | |
| shortDT_plate1_16 | /5Phos/ACGACGCTCTTCCGATCTNNNNNNNNATCTCCGAACT | 16 | ATCTCCGAAC | 208 |
| | TTTTTTTTTTTTTT | | | |
| shortDT_plate1_17 | /5Phos/ACGACGCTCTTCCGATCTNNNNNNNNTTGACTTCAGT | 17 | TTGACTTCAG | 209 |
| | TTTTTTTTTTTTTT | | | |
| shortDT_plate1_18 | /5Phos/ACGACGCTCTTCCGATCTNNNNNNNNGGCAGGTATTT | 18 | GGCAGGTATT | 210 |
| | TTTTTTTTTTTTTT | | | |
| shortDT_plate1_19 | /5Phos/ACGACGCTCTTCCGATCTNNNNNNNNAGAGCTATAAT | 19 | AGAGCTATAA | 211 |
| | TTTTTTTTTTTTTT | | | |
| shortDT_plate1_20 | /5Phos/ACGACGCTCTTCCGATCTNNNNNNNNCTAAGAGAAGT | 20 | CTAAGAGAAG | 212 |
| | TTTTTTTTTTTTTT | | | |
| shortDT_plate1_21 | /5Phos/ACGACGCTCTTCCGATCTNNNNNNNNACTCAATAGGT | 21 | ACTCAATAGG | 213 |
| | TTTTTTTTTTTTTT | | | |
| shortDT_plate1_22 | /5Phos/ACGACGCTCTTCCGATCTNNNNNNNNCTTGCGCCGCT | 22 | CTTGCGCCGC | 214 |
| | TTTTTTTTTTTTTT | | | |
| shortDT_plate1_23 | /5Phos/ACGACGCTCTTCCGATCTNNNNNNNNAATCGTAGCGT | 23 | AATCGTAGCG | 215 |
| | TTTTTTTTTTTTTT | | | |
| shortDT_plate1_24 | /5Phos/ACGACGCTCTTCCGATCTNNNNNNNNGGTACTGCCTT | 24 | GGTACTGCCT | 216 |
| | TTTTTTTTTTTTTT | | | |
| shortDT_plate1_25 | /5Phos/ACGACGCTCTTCCGATCTNNNNNNNNTAGAATTAACT | 25 | TAGAATTAAC | 217 |
| | TTTTTTTTTTTTTT | | | |
| shortDT_plate1_26 | /5Phos/ACGACGCTCTTCCGATCTNNNNNNNNGCCATTCTCCTT | 26 | GCCATTCTCC | 218 |
| | TTTTTTTTTTTTT | | | |
| shortDT_plate1_27 | /5Phos/ACGACGCTCTTCCGATCTNNNNNNNNTGCCGGCAGAT | 27 | TGCCGGCAGA | 219 |
| | TTTTTTTTTTTTTT | | | |
| shortDT_plate1_28 | /5Phos/ACGACGCTCTTCCGATCTNNNNNNNNTTACCGAGGCT | 28 | TTACCGAGGC | 220 |
| | TTTTTTTTTTTTTT | | | |
| shortDT_plate1_29 | /5Phos/ACGACGCTCTTCCGATCTNNNNNNNNATCATATTAGT | 29 | ATCATATTAG | 221 |
| | TTTTTTTTTTTTTT | | | |
| shortDT_plate1_30 | /5Phos/ACGACGCTCTTCCGATCTNNNNNNNNTGGTCAGCCAT | 30 | TGGTCAGCCA | 222 |
| | TTTTTTTTTTTTTT | | | |
| shortDT_plate1_31 | /5Phos/ACGACGCTCTTCCGATCTNNNNNNNNACTATGCAATT | 31 | ACTATGCAAT | 223 |
| | TTTTTTTTTTTTTT | | | |
| shortDT_plate1_32 | /5Phos/ACGACGCTCTTCCGATCTNNNNNNNNCGACGCGACTT | 32 | CGACGCGACT | 224 |
| | TTTTTTTTTTTTTT | | | |
| shortDT_plate1_33 | /5Phos/ACGACGCTCTTCCGATCTNNNNNNNNGATACGGAACT | 33 | GATACGGAAC | 225 |
| | TTTTTTTTTTTTTT | | | |
| shortDT_plate1_34 | /5Phos/ACGACGCTCTTCCGATCTNNNNNNNNTTATCCGGATT | 34 | TTATCCGGAT | 226 |
| | TTTTTTTTTTTTTT | | | |
| shortDT_plate1_35 | /5Phos/ACGACGCTCTTCCGATCTNNNNNNNNTAGAGTAATAT | 35 | TAGAGTAATA | 227 |
| | TTTTTTTTTTTTTT | | | |
| shortDT_plate1_36 | /5Phos/ACGACGCTCTTCCGATCTNNNNNNNNGCAGGTCCGTT | 36 | GCAGGTCCGT | 228 |
| | TTTTTTTTTTTTTT | | | |
| shortDT_plate1_37 | /5Phos/ACGACGCTCTTCCGATCTNNNNNNNNTCGGCCTTACT | 37 | TCGGCCTTAC | 229 |
| | TTTTTTTTTTTTTT | | | |
| shortDT_plate1_38 | /5Phos/ACGACGCTCTTCCGATCTNNNNNNNNAGAACGTCTCT | 38 | AGAACGTCTC | 230 |
| | TTTTTTTTTTTTTT | | | |
| shortDT_plate1_39 | /5Phos/ACGACGCTCTTCCGATCTNNNNNNNNCCAGTTCCAAT | 39 | CCAGTTCCAA | 231 |
| | TTTTTTTTTTTTTT | | | |
| shortDT_plate1_40 | /5Phos/ACGACGCTCTTCCGATCTNNNNNNNNGGCGTTAAGGT | 40 | GGCGTTAAGG | 232 |
| | TTTTTTTTTTTTTT | | | |
| shortDT_plate1_41 | /5Phos/ACGACGCTCTTCCGATCTNNNNNNNNACTTAACCTTTT | 41 | ACTTAACCTT | 233 |
| | TTTTTTTTTTTTT | | | |
| shortDT_plate1_42 | /5Phos/ACGACGCTCTTCCGATCTNNNNNNNNCAACCGCTAAT | 42 | CAACCGCTAA | 234 |
| | TTTTTTTTTTTTTT | | | |
| shortDT_plate1_43 | /5Phos/ACGACGCTCTTCCGATCTNNNNNNNNGACCTTGATAT | 43 | GACCTTGATA | 235 |
| | TTTTTTTTTTTTTT | | | |
| shortDT_plate1_44 | /5Phos/ACGACGCTCTTCCGATCTNNNNNNNNTCTGATACCAT | 44 | TCTGATACCA | 236 |
| | TTTTTTTTTTTTTT | | | |
| shortDT_plate1_45 | /5Phos/ACGACGCTCTTCCGATCTNNNNNNNNGAAGATCGAG | 45 | GAAGATCGAG | 237 |
| | TTTTTTTTTTTTTTT | | | |
| shortDT_plate1_46 | /5Phos/ACGACGCTCTTCCGATCTNNNNNNNNAGGAGCGGTA | 46 | AGGAGCGGTA | 238 |
| | TTTTTTTTTTTTTTT | | | |
| shortDT_plate1_47 | /5Phos/ACGACGCTCTTCCGATCTNNNNNNNNAAGAAGCTAGT | 47 | AAGAAGCTAG | 239 |
| | TTTTTTTTTTTTTT | | | |
| shortDT_plate1_48 | /5Phos/ACGACGCTCTTCCGATCTNNNNNNNNTCCGGCCTCGT | 48 | TCCGGCCTCG | 240 |
| | TTTTTTTTTTTTTT | | | |
| shortDT_plate1_49 | /5Phos/ACGACGCTCTTCCGATCTNNNNNNNNAGAGAAGGTTT | 49 | AGAGAAGGTT | 241 |
| | TTTTTTTTTTTTTT | | | |
| shortDT_plate1_50 | /5Phos/ACGACGCTCTTCCGATCTNNNNNNNNCATACTCCGAT | 50 | CATACTCCGA | 242 |
| | TTTTTTTTTTTTTT | | | |
| shortDT_plate1_51 | /5Phos/ACGACGCTCTTCCGATCTNNNNNNNNGCTAACTTGCT | 51 | GCTAACTTGC | 243 |
| | TTTTTTTTTTTTTT | | | |
| shortDT_plate1_52 | /5Phos/ACGACGCTCTTCCGATCTNNNNNNNNAATCCATCTTTT | 52 | AATCCATCTT | 244 |
| | TTTTTTTTTTTTT | | | |
| shortDT_plate1_53 | /5Phos/ACGACGCTCTTCCGATCTNNNNNNNNGGCTGAGCTCT | 53 | GGCTGAGCTC | 245 |
| | TTTTTTTTTTTTTT | | | |
| shortDT_plate1_54 | /5Phos/ACGACGCTCTTCCGATCTNNNNNNNNCCGATTCCTGT | 54 | CCGATTCCTG | 246 |
| | TTTTTTTTTTTTTT | | | |
| shortDT_plate1_55 | /5Phos/ACGACGCTCTTCCGATCTNNNNNNNNACCGCCAACCT | 55 | ACCGCCAACC | 247 |
| | TTTTTTTTTTTTTT | | | |
| shortDT_plate1_56 | /5Phos/ACGACGCTCTTCCGATCTNNNNNNNNTGGCCTGAAGT | 56 | TGGCCTGAAG | 248 |
| | TTTTTTTTTTTTTT | | | |
| shortDT_plate1_57 | /5Phos/ACGACGCTCTTCCGATCTNNNNNNNNAACCTCATTCTT | 57 | AACCTCATTC | 249 |
| | TTTTTTTTTTTTT | | | |
| shortDT_plate1_58 | /5Phos/ACGACGCTCTTCCGATCTNNNNNNNNATAAGGAGCAT | 58 | ATAAGGAGCA | 250 |
| | TTTTTTTTTTTTTT | | | |
| shortDT_plate1_59 | /5Phos/ACGACGCTCTTCCGATCTNNNNNNNNCGAACGCCGGT | 59 | CGAACGCCGG | 251 |
| | TTTTTTTTTTTTTT | | | |
| shortDT_plate1_60 | /5Phos/ACGACGCTCTTCCGATCTNNNNNNNNGGTATGCTTGT | 60 | GGTATGCTTG | 252 |
| | TTTTTTTTTTTTTT | | | |
| shortDT_plate1_61 | /5Phos/ACGACGCTCTTCCGATCTNNNNNNNNAACCTGCGTAT | 61 | AACCTGCGTA | 253 |
| | TTTTTTTTTTTTTT | | | |
| shortDT_plate1_62 | /5Phos/ACGACGCTCTTCCGATCTNNNNNNNNGGCAGACGCCT | 52 | GGCAGACGCC | 254 |
| | TTTTTTTTTTTTTT | | | |
| shortDT_plate1_63 | /5Phos/ACGACGCTCTTCCGATCTNNNNNNNNTAGCCGTCATT | 63 | TAGCCGTCAT | 255 |
| | TTTTTTTTTTTTTT | | | |
| shortDT_plate1_64 | /5Phos/ACGACGCTCTTCCGATCTNNNNNNNNCCTGGAAGAGT | 64 | CCTGGAAGAG | 256 |
| | TTTTTTTTTTTTTT | | | |
| shortDT_plate1_65 | /5Phos/ACGACGCTCTTCCGATCTNNNNNNNNGGAGGTTCTAT | 65 | GGAGGTTCTA | 257 |
| | TTTTTTTTTTTTTT | | | |
| shortDT_plate1_66 | /5Phos/ACGACGCTCTTCCGATCTNNNNNNNNCTAGTAGTCTT | 66 | CTAGTAGTCT | 258 |
| | TTTTTTTTTTTTTT | | | |
| shortDT_plate1_67 | /5Phos/ACGACGCTCTTCCGATCTNNNNNNNNATCATCAACGT | 67 | ATCATCAACG | 259 |
| | TTTTTTTTTTTTTT | | | |
| shortDT_plate1_68 | /5Phos/ACGACGCTCTTCCGATCTNNNNNNNNACGCGAGATTT | 68 | ACGCGAGATT | 260 |
| | TTTTTTTTTTTTTT | | | |
| shortDT_plate1_69 | /5Phos/ACGACGCTCTTCCGATCTNNNNNNNNGAAGAGGCAT | 69 | GAAGAGGCAT | 261 |
| | TTTTTTTTTTTTTTT | | | |
| shortDT_plate1_70 | /5Phos/ACGACGCTCTTCCGATCTNNNNNNNNGGTATCCGCCT | 70 | GGTATCCGCC | 262 |
| | TTTTTTTTTTTTTT | | | |
| shortDT_plate1_71 | /5Phos/ACGACGCTCTTCCGATCTNNNNNNNNAACTAGGCGCT | 71 | AACTAGGCGC | 263 |
| | TTTTTTTTTTTTTT | | | |
| shortDT_plate1_72 | /5Phos/ACGACGCTCTTCCGATCTNNNNNNNNTCGCTAAGCAT | 72 | TCGCTAAGCA | 264 |
| | TTTTTTTTTTTTTT | | | |
| shortDT_plate1_73 | /5Phos/ACGACGCTCTTCCGATCTNNNNNNNNTATATACTAAT | 73 | TATATACTAA | 265 |
| | TTTTTTTTTTTTTT | | | |
| shortDT_plate1_74 | /5Phos/ACGACGCTCTTCCGATCTNNNNNNNNACTTGCTAGAT | 74 | ACTTGCTAGA | 266 |
| | TTTTTTTTTTTTTT | | | |
| shortDT_plate1_75 | /5Phos/ACGACGCTCTTCCGATCTNNNNNNNNAACCATTGGAT | 75 | AACCATTGGA | 267 |
| | TTTTTTTTTTTTTT | | | |
| shortDT_plate1_76 | /5Phos/ACGACGCTCTTCCGATCTNNNNNNNNTCGCGGTTGGT | 76 | TCGCGGTTGG | 268 |
| | TTTTTTTTTTTTTT | | | |
| shortDT_plate1_77 | /5Phos/ACGACGCTCTTCCGATCTNNNNNNNNCGTAGTTACCT | 77 | CGTAGTTACC | 269 |
| | TTTTTTTTTTTTTT | | | |
| shortDT_plate1_78 | /5Phos/ACGACGCTCTTCCGATCTNNNNNNNNTCCAATCATCTT | 78 | TCCAATCATC | 270 |
| | TTTTTTTTTTTTT | | | |
| shortDT_plate1_79 | /5Phos/ACGACGCTCTTCCGATCTNNNNNNNNAATCGATAATT | 79 | AATCGATAAT | 271 |
| | TTTTTTTTTTTTTT | | | |
| shortDT_plate1_80 | /5Phos/ACGACGCTCTTCCGATCTNNNNNNNNCCATTATCTATT | 80 | CCATTATCTA | 272 |
| | TTTTTTTTTTTTT | | | |
| shortDT_plate1_81 | /5Phos/ACGACGCTCTTCCGATCTNNNNNNNNTCAACGTAAGT | 81 | TCAACGTAAG | 273 |
| | TTTTTTTTTTTTTT | | | |
| shortDT_plate1_82 | /5Phos/ACGACGCTCTTCCGATCTNNNNNNNNTCTAATAGTAT | 82 | TCTAATAGTA | 274 |
| | TTTTTTTTTTTTTT | | | |
| shortDT_plate1_83 | /5Phos/ACGACGCTCTTCCGATCTNNNNNNNNAACCGCTGGTT | 83 | AACCGCTGGT | 275 |
| | TTTTTTTTTTTTTT | | | |
| shortDT_plate1_84 | /5Phos/ACGACGCTCTTCCGATCTNNNNNNNNGATCGCTTCTT | 84 | GATCGCTTCT | 276 |
| | TTTTTTTTTTTTTT | | | |
| shortDT_plate1_85 | /5Phos/ACGACGCTCTTCCGATCTNNNNNNNNCTAACTAGATT | 85 | CTAACTAGAT | 277 |
| | TTTTTTTTTTTTTT | | | |
| shortDT_plate1_86 | /5Phos/ACGACGCTCTTCCGATCTNNNNNNNNGCTGGAACTTT | 86 | GCTGGAACTT | 278 |
| | TTTTTTTTTTTTTT | | | |
| shortDT_plate1_87 | /5Phos/ACGACGCTCTTCCGATCTNNNNNNNNAGGTTAGTTCT | 87 | AGGTTAGTTC | 279 |
| | TTTTTTTTTTTTTT | | | |
| shortDT_plate1_88 | /5Phos/ACGACGCTCTTCCGATCTNNNNNNNNCATTCGACGGT | 88 | CATTCGACGG | 280 |
| | TTTTTTTTTTTTTT | | | |
| shortDT_plate1_89 | /5Phos/ACGACGCTCTTCCGATCTNNNNNNNNCATTCAATCAT | 89 | CATTCAATCA | 281 |
| | TTTTTTTTTTTTTT | | | |
| shortDT_plate1_90 | /5Phos/ACGACGCTCTTCCGATCTNNNNNNNNCGGATTAGAAT | 90 | CGGATTAGAA | 282 |
| | TTTTTTTTTTTTTT | | | |
| shortDT_plate1_91 | /5Phos/ACGACGCTCTTCCGATCTNNNNNNNNATCGGCTATCT | 91 | ATCGGCTATC | 283 |
| | TTTTTTTTTTTTTT | | | |
| shortDT_plate1_92 | /5Phos/ACGACGCTCTTCCGATCTNNNNNNNNCCTTGATCGTT | 92 | CCTTGATCGT | 284 |
| | TTTTTTTTTTTTTT | | | |
| shortDT_plate1_93 | /5Phos/ACGACGCTCTTCCGATCTNNNNNNNNACGAAGTCAAT | 93 | ACGAAGTCAA | 285 |
| | TTTTTTTTTTTTTT | | | |
| shortDT_plate1_94 | /5Phos/ACGACGCTCTTCCGATCTNNNNNNNNTTACCTCGACT | 94 | TTACCTCGAC | 286 |
| | TTTTTTTTTTTTTT | | | |
| shortDT_plate1_95 | /5Phos/ACGACGCTCTTCCGATCTNNNNNNNNGGAGGATAGC | 95 | GGAGGATAGC | 287 |
| | TTTTTTTTTTTTTTT | | | |
| shortDT_plate1_96 | /5Phos/ACGACGCTCTTCCGATCTNNNNNNNNGGCTCTCTATT | 96 | GGCTCTCTAT | 288 |
| | TTTTTTTTTTTTTT | | | |
| shortDT_plate2_01 | /5Phos/ACGACGCTCTTCCGATCTNNNNNNNNGGTTGGCGACT | 97 | GGTTGGCGAC | 289 |
| | TTTTTTTTTTTTTT | | | |
| shortDT_plate2_02 | /5Phos/ACGACGCTCTTCCGATCTNNNNNNNNGTAGATCGTTT | 98 | GTAGATCGTT | 290 |
| | TTTTTTTTTTTTTT | | | |
| shortDT_plate2_03 | /5Phos/ACGACGCTCTTCCGATCTNNNNNNNNGAGGTCGGTTT | 99 | GAGGTCGGTT | 291 |
| | TTTTTTTTTTTTTT | | | |
| shortDT_plate2_04 | /5Phos/ACGACGCTCTTCCGATCTNNNNNNNNACGCGCTCCTT | 100 | ACGCGCTCCT | 292 |
| | TTTTTTTTTTTTTT | | | |
| shortDT_plate2_05 | /5Phos/ACGACGCTCTTCCGATCTNNNNNNNNAGCGTCGTATT | 101 | AGCGTCGTAT | 293 |
| | TTTTTTTTTTTTTT | | | |
| shortDT_plate2_06 | /5Phos/ACGACGCTCTTCCGATCTNNNNNNNNGACCAATGCGT | 102 | GACCAATGCG | 294 |
| | TTTTTTTTTTTTTT | | | |
| shortDT_plate2_07 | /5Phos/ACGACGCTCTTCCGATCTNNNNNNNNAGGTAGAGCTT | 103 | AGGTAGAGCT | 295 |
| | TTTTTTTTTTTTTT | | | |
| shortDT_plate2_08 | /5Phos/ACGACGCTCTTCCGATCTNNNNNNNNTTGCAGCATTT | 104 | TTGCAGCATT | 296 |
| | TTTTTTTTTTTTTT | | | |
| shortDT_plate2_09 | /5Phos/ACGACGCTCTTCCGATCTNNNNNNNNGTAGATGCGCT | 105 | GTAGATGCGC | 297 |
| | TTTTTTTTTTTTTT | | | |
| shortDT_plate2_10 | /5Phos/ACGACGCTCTTCCGATCTNNNNNNNNTCGGTAAGGCT | 106 | TCGGTAAGGC | 298 |
| | TTTTTTTTTTTTTT | | | |
| shortDT_plate2_11 | /5Phos/ACGACGCTCTTCCGATCTNNNNNNNNACGATAGACTT | 107 | ACGATAGACT | 299 |
| | TTTTTTTTTTTTTT | | | |
| shortDT_plate2_12 | /5Phos/ACGACGCTCTTCCGATCTNNNNNNNNGCGGCCAATCT | 108 | GCGGCCAATC | 300 |
| | TTTTTTTTTTTTTT | | | |
| shortDT_plate2_13 | /5Phos/ACGACGCTCTTCCGATCTNNNNNNNNACGCGTATCGT | 109 | ACGCGTATCG | 301 |
| | TTTTTTTTTTTTTT | | | |
| shortDT_plate2_14 | /5Phos/ACGACGCTCTTCCGATCTNNNNNNNNCATGACTCAAT | 110 | CATGACTCAA | 302 |
| | TTTTTTTTTTTTTT | | | |
| shortDT_plate2_15 | /5Phos/ACGACGCTCTTCCGATCTNNNNNNNNACTCCGCCAAT | 111 | ACTCCGCCAA | 303 |
| | TTTTTTTTTTTTTT | | | |
| shortDT_plate2_16 | /5Phos/ACGACGCTCTTCCGATCTNNNNNNNNACGTTGAATGT | 112 | ACGTTGAATG | 304 |
| | TTTTTTTTTTTTTT | | | |
| shortDT_plate2_17 | /5Phos/ACGACGCTCTTCCGATCTNNNNNNNNAGGACTGCGAT | 113 | AGGACTGCGA | 305 |
| | TTTTTTTTTTTTTT | | | |
| shortDT_plate2_18 | /5Phos/ACGACGCTCTTCCGATCTNNNNNNNNACTCGACGCCT | 114 | ACTCGACGCC | 306 |
| | TTTTTTTTTTTTTT | | | |
| shortDT_plate2_19 | /5Phos/ACGACGCTCTTCCGATCTNNNNNNNNCCTATCATAAT | 115 | CCTATCATAA | 307 |
| | TTTTTTTTTTTTTT | | | |
| shortDT_plate2_20 | /5Phos/ACGACGCTCTTCCGATCTNNNNNNNNAATCCGGTCAT | 116 | AATCCGGTCA | 308 |
| | TTTTTTTTTTTTTT | | | |
| shortDT_plate2_21 | /5Phos/ACGACGCTCTTCCGATCTNNNNNNNNCTATTAACCAT | 117 | CTATTAACCA | 309 |
| | TTTTTTTTTTTTTT | | | |
| shortDT_plate2_22 | /5Phos/ACGACGCTCTTCCGATCTNNNNNNNNGATCCAGCGTT | 118 | GATCCAGCGT | 310 |
| | TTTTTTTTTTTTTT | | | |
| shortDT_plate2_23 | /5Phos/ACGACGCTCTTCCGATCTNNNNNNNNTGAGACTCTAT | 119 | TGAGACTCTA | 311 |
| | TTTTTTTTTTTTTT | | | |
| shortDT_plate2_24 | /5Phos/ACGACGCTCTTCCGATCTNNNNNNNNGCGGAGTCGA | 120 | GCGGAGTCGA | 312 |
| | TTTTTTTTTTTTTTT | | | |
| shortDT_plate2_25 | /5Phos/ACGACGCTCTTCCGATCTNNNNNNNNGAGGCTTATTT | 121 | GAGGCTTATT | 313 |
| | TTTTTTTTTTTTTT | | | |
| shortDT_plate2_26 | /5Phos/ACGACGCTCTTCCGATCTNNNNNNNNCGCCAGGCATT | 122 | CGCCAGGCAT | 314 |
| | TTTTTTTTTTTTTT | | | |
| shortDT_plate2_27 | /5Phos/ACGACGCTCTTCCGATCTNNNNNNNNAATACCAGTTT | 123 | AATACCAGTT | 315 |
| | TTTTTTTTTTTTTT | | | |
| shortDT_plate2_28 | /5Phos/ACGACGCTCTTCCGATCTNNNNNNNNGCGGTTATTGT | 124 | GCGGTTATTG | 316 |
| | TTTTTTTTTTTTTT | | | |
| shortDT_plate2_29 | /5Phos/ACGACGCTCTTCCGATCTNNNNNNNNCATCCAGCCAT | 125 | CATCCAGCCA | 317 |
| | TTTTTTTTTTTTTT | | | |
| shortDT_plate2_30 | /5Phos/ACGACGCTCTTCCGATCTNNNNNNNNGGCTGCCTTAT | 126 | GGCTGCCTTA | 318 |
| | TTTTTTTTTTTTTT | | | |
| shortDT_plate2_31 | /5Phos/ACGACGCTCTTCCGATCTNNNNNNNNTTCTATAGAGT | 127 | TTCTATAGAG | 319 |
| | TTTTTTTTTTTTTT | | | |
| shortDT_plate2_32 | /5Phos/ACGACGCTCTTCCGATCTNNNNNNNNTCTAGTCAAGT | 128 | TCTAGTCAAG | 320 |
| | TTTTTTTTTTTTTT | | | |
| shortDT_plate2_33 | /5Phos/ACGACGCTCTTCCGATCTNNNNNNNNACGGAGAATAT | 129 | ACGGAGAATA | 321 |
| | TTTTTTTTTTTTTT | | | |
| shortDT_plate2_34 | /5Phos/ACGACGCTCTTCCGATCTNNNNNNNNATTAACTTAAT | 130 | ATTAACTTAA | 322 |
| | TTTTTTTTTTTTTT | | | |
| shortDT_plate2_35 | /5Phos/ACGACGCTCTTCCGATCTNNNNNNNNCGTATTGAGAT | 131 | CGTATTGAGA | 323 |
| | TTTTTTTTTTTTTT | | | |
| shortDT_plate2_36 | /5Phos/ACGACGCTCTTCCGATCTNNNNNNNNTAGCCAGCAAT | 132 | TAGCCAGCAA | 324 |
| | TTTTTTTTTTTTTT | | | |
| shortDT_plate2_37 | /5Phos/ACGACGCTCTTCCGATCTNNNNNNNNTCGGCGTCGTT | 133 | TCGGCGTCGT | 325 |
| | TTTTTTTTTTTTTT | | | |
| shortDT_plate2_38 | /5Phos/ACGACGCTCTTCCGATCTNNNNNNNNGCCTGATATAT | 134 | GCCTGATATA | 326 |
| | TTTTTTTTTTTTTT | | | |
| shortDT_plate2_39 | /5Phos/ACGACGCTCTTCCGATCTNNNNNNNNGCCTCAGCATT | 135 | GCCTCAGCAT | 327 |
| | TTTTTTTTTTTTTT | | | |
| shortDT_plate2_40 | /5Phos/ACGACGCTCTTCCGATCTNNNNNNNNATCTAGGTTCT | 136 | ATCTAGGTTC | 328 |
| | TTTTTTTTTTTTTT | | | |
| shortDT_plate2_41 | /5Phos/ACGACGCTCTTCCGATCTNNNNNNNNGACGAGGTTGT | 137 | GACGAGGTTG | 329 |
| | TTTTTTTTTTTTTT | | | |
| shortDT_plate2_42 | /5Phos/ACGACGCTCTTCCGATCTNNNNNNNNCTGGTTGGTTT | 138 | CTGGTTGGTT | 330 |
| | TTTTTTTTTTTTTT | | | |
| shortDT_plate2_43 | /5Phos/ACGACGCTCTTCCGATCTNNNNNNNNCCGCGCAGGTT | 139 | CCGCGCAGGT | 331 |
| | TTTTTTTTTTTTTT | | | |
| shortDT_plate2_44 | /5Phos/ACGACGCTCTTCCGATCTNNNNNNNNACTCTACTGGT | 140 | ACTCTACTGG | 332 |
| | TTTTTTTTTTTTTT | | | |
| shortDT_plate2_45 | /5Phos/ACGACGCTCTTCCGATCTNNNNNNNNCCTGAGAGCAT | 141 | CCTGAGAGCA | 333 |
| | TTTTTTTTTTTTTT | | | |
| shortDT_plate2_46 | /5Phos/ACGACGCTCTTCCGATCTNNNNNNNNACCAGTATAAT | 142 | ACCAGTATAA | 334 |
| | TTTTTTTTTTTTTT | | | |
| shortDT_plate2_47 | /5Phos/ACGACGCTCTTCCGATCTNNNNNNNNTCCGCCGGTCT | 143 | TCCGCCGGTC | 335 |
| | TTTTTTTTTTTTTT | | | |
| shortDT_plate2_48 | /5Phos/ACGACGCTCTTCCGATCTNNNNNNNNTGCCTAACTTTT | 144 | TGCCTAACTT | 336 |
| | TTTTTTTTTTTTT | | | |
| shortDT_plate2_49 | /5Phos/ACGACGCTCTTCCGATCTNNNNNNNNTTCTCTGAGAT | 145 | TTCTCTGAGA | 337 |
| | TTTTTTTTTTTTTT | | | |
| shortDT_plate2_50 | /5Phos/ACGACGCTCTTCCGATCTNNNNNNNNCCTGCATCAAT | 146 | CCTGCATCAA | 338 |
| | TTTTTTTTTTTTTT | | | |
| shortDT_plate2_51 | /5Phos/ACGACGCTCTTCCGATCTNNNNNNNNTCTGACGAGGT | 147 | TCTGACGAGG | 339 |
| | TTTTTTTTTTTTTT | | | |
| shortDT_plate2_52 | /5Phos/ACGACGCTCTTCCGATCTNNNNNNNNGATTCCGGAAT | 148 | GATTCCGGAA | 340 |
| | TTTTTTTTTTTTTT | | | |
| shortDT_plate2_53 | /5Phos/ACGACGCTCTTCCGATCTNNNNNNNNTGGCATAACGT | 149 | TGGCATAACG | 341 |
| | TTTTTTTTTTTTTT | | | |
| shortDT_plate2_54 | /5Phos/ACGACGCTCTTCCGATCTNNNNNNNNTCTCTCATCCTT | 150 | TCTCTCATCC | 342 |
| | TTTTTTTTTTTTT | | | |
| shortDT_plate2_55 | /5Phos/ACGACGCTCTTCCGATCTNNNNNNNNTTCGCTGCCTTT | 151 | TTCGCTGCCT | 343 |
| | TTTTTTTTTTTTT | | | |
| shortDT_plate2_56 | /5Phos/ACGACGCTCTTCCGATCTNNNNNNNNGGATTCTATCT | 152 | GGATTCTATC | 344 |
| | TTTTTTTTTTTTTT | | | |
| shortDT_plate2_57 | /5Phos/ACGACGCTCTTCCGATCTNNNNNNNNTAGAATAGCCT | 153 | TAGAATAGCC | 345 |
| | TTTTTTTTTTTTTT | | | |
| shortDT_plate2_58 | /5Phos/ACGACGCTCTTCCGATCTNNNNNNNNGCTCGAATCAT | 154 | GCTCGAATCA | 346 |
| | TTTTTTTTTTTTTT | | | |
| shortDT_plate2_59 | /5Phos/ACGACGCTCTTCCGATCTNNNNNNNNGGCTCGAGATT | 155 | GGCTCGAGAT | 347 |
| | TTTTTTTTTTTTTT | | | |
| shortDT_plate2_60 | /5Phos/ACGACGCTCTTCCGATCTNNNNNNNNTCCTCTCCGTTT | 156 | TCCTCTCCGT | 348 |
| | TTTTTTTTTTTTT | | | |
| shortDT_plate2_61 | /5Phos/ACGACGCTCTTCCGATCTNNNNNNNNATAACCGTTCT | 157 | ATAACCGTTC | 349 |
| | TTTTTTTTTTTTTT | | | |
| shortDT_plate2_62 | /5Phos/ACGACGCTCTTCCGATCTNNNNNNNNAGGTCTATGGT | 158 | AGGTCTATGG | 350 |
| | TTTTTTTTTTTTTT | | | |
| shortDT_plate2_63 | /5Phos/ACGACGCTCTTCCGATCTNNNNNNNNAGCAAGAACCT | 159 | AGCAAGAACC | 351 |
| | TTTTTTTTTTTTTT | | | |
| shortDT_plate2_64 | /5Phos/ACGACGCTCTTCCGATCTNNNNNNNNTTGATATGAAT | 160 | TTGATATGAA | 352 |
| | TTTTTTTTTTTTTT | | | |
| shortDT_plate2_65 | /5Phos/ACGACGCTCTTCCGATCTNNNNNNNNTGGCAGAAGTT | 161 | TGGCAGAAGT | 353 |
| | TTTTTTTTTTTTTT | | | |
| shortDT_plate2_66 | /5Phos/ACGACGCTCTTCCGATCTNNNNNNNNCTTCATTAGAT | 162 | CTTCATTAGA | 354 |
| | TTTTTTTTTTTTTT | | | |
| shortDT_plate2_67 | /5Phos/ACGACGCTCTTCCGATCTNNNNNNNNAATCGAACTCT | 163 | AATCGAACTC | 355 |
| | TTTTTTTTTTTTTT | | | |
| shortDT_plate2_68 | /5Phos/ACGACGCTCTTCCGATCTNNNNNNNNGGACGACGCA | 164 | GGACGACGCA | 356 |
| | TTTTTTTTTTTTTTT | | | |
| shortDT_plate2_69 | /5Phos/ACGACGCTCTTCCGATCTNNNNNNNNCGTCTATGAAT | 165 | CGTCTATGAA | 357 |
| | TTTTTTTTTTTTTT | | | |
| shortDT_plate2_70 | /5Phos/ACGACGCTCTTCCGATCTNNNNNNNNCGAATCTCCTT | 166 | CGAATCTCCT | 358 |
| | TTTTTTTTTTTTTT | | | |
| shortDT_plate2_71 | /5Phos/ACGACGCTCTTCCGATCTNNNNNNNNGGCTATTCGAT | 167 | GGCTATTCGA | 359 |
| | TTTTTTTTTTTTTT | | | |
| shortDT_plate2_72 | /5Phos/ACGACGCTCTTCCGATCTNNNNNNNNTCTATCGGTAT | 168 | TCTATCGGTA | 360 |
| | TTTTTTTTTTTTTT | | | |
| shortDT_plate2_73 | /5Phos/ACGACGCTCTTCCGATCTNNNNNNNNCGAAGGCATGT | 169 | CGAAGGCATG | 361 |
| | TTTTTTTTTTTTTT | | | |
| shortDT_plate2_74 | /5Phos/ACGACGCTCTTCCGATCTNNNNNNNNAATTGAGAGAT | 170 | AATTGAGAGA | 362 |
| | TTTTTTTTTTTTTT | | | |
| shortDT_plate2_75 | /5Phos/ACGACGCTCTTCCGATCTNNNNNNNNGTAGTTGGATT | 171 | GTAGTTGGAT | 363 |
| | TTTTTTTTTTTTTT | | | |
| shortDT_plate2_76 | /5Phos/ACGACGCTCTTCCGATCTNNNNNNNNCCTAAGCGGTT | 172 | CCTAAGCGGT | 364 |
| | TTTTTTTTTTTTTT | | | |
| shortDT_plate2_77 | /5Phos/ACGACGCTCTTCCGATCTNNNNNNNNCGTAAGGAGTT | 173 | CGTAAGGAGT | 365 |
| | TTTTTTTTTTTTTT | | | |
| shortDT_plate2_78 | /5Phos/ACGACGCTCTTCCGATCTNNNNNNNNAAGCATCCTAT | 174 | AAGCATCCTA | 366 |
| | TTTTTTTTTTTTTT | | | |
| shortDT_plate2_79 | /5Phos/ACGACGCTCTTCCGATCTNNNNNNNNCTGAAGAGACT | 175 | CTGAAGAGAC | 367 |
| | TTTTTTTTTTTTTT | | | |
| shortDT_plate2_80 | /5Phos/ACGACGCTCTTCCGATCTNNNNNNNNGGCTTCTGGAT | 176 | GGCTTCTGGA | 368 |
| | TTTTTTTTTTTTTT | | | |
| shortDT_plate2_81 | /5Phos/ACGACGCTCTTCCGATCTNNNNNNNNAGCGATCCGCT | 177 | AGCGATCCGC | 369 |
| | TTTTTTTTTTTTTT | | | |
| shortDT_plate2_82 | /5Phos/ACGACGCTCTTCCGATCTNNNNNNNNACGCTTCTCTTT | 178 | ACGCTTCTCT | 370 |
| | TTTTTTTTTTTTT | | | |
| shortDT_plate2_83 | /5Phos/ACGACGCTCTTCCGATCTNNNNNNNNATATGCCATCT | 179 | ATATGCCATC | 371 |
| | TTTTTTTTTTTTTT | | | |
| shortDT_plate2_84 | /5Phos/ACGACGCTCTTCCGATCTNNNNNNNNAAGTACGTTAT | 180 | AAGTACGTTA | 372 |
| | TTTTTTTTTTTTTT | | | |
| shortDT_plate2_85 | /5Phos/ACGACGCTCTTCCGATCTNNNNNNNNGAATGAGGAG | 181 | GAATGAGGAG | 373 |
| | TTTTTTTTTTTTTTT | | | |
| shortDT_plate2_86 | /5Phos/ACGACGCTCTTCCGATCTNNNNNNNNAGGCCGGTAAT | 182 | AGGCCGGTAA | 374 |
| | TTTTTTTTTTTTTT | | | |
| shortDT_plate2_87 | /5Phos/ACGACGCTCTTCCGATCTNNNNNNNNGCCATCAACTT | 183 | GCCATCAACT | 375 |
| | TTTTTTTTTTTTTT | | | |
| shortDT_plate2_88 | /5Phos/ACGACGCTCTTCCGATCTNNNNNNNNACTGGTAGATT | 184 | ACTGGTAGAT | 376 |
| | TTTTTTTTTTTTTT | | | |
| shortDT_plate2_89 | /5Phos/ACGACGCTCTTCCGATCTNNNNNNNNATGAGTTCTCT | 185 | ATGAGTTCTC | 377 |
| | TTTTTTTTTTTTTT | | | |
| shortDT_plate2_90 | /5Phos/ACGACGCTCTTCCGATCTNNNNNNNNCCATCGGACCT | 186 | CCATCGGACC | 378 |
| | TTTTTTTTTTTTTT | | | |
| shortDT_plate2_91 | /5Phos/ACGACGCTCTTCCGATCTNNNNNNNNGGCATCTACCT | 187 | GGCATCTACC | 379 |
| | TTTTTTTTTTTTTT | | | |
| shortDT_plate2_92 | /5Phos/ACGACGCTCTTCCGATCTNNNNNNNNTTCTCTACTATT | 188 | TTCTCTACTA | 380 |
| | TTTTTTTTTTTTT | | | |
| shortDT_plate2_93 | /5Phos/ACGACGCTCTTCCGATCTNNNNNNNNCCAGGCTCTTT | 189 | CCAGGCTCTT | 381 |
| | TTTTTTTTTTTTTT | | | |
| shortDT_plate2_94 | /5Phos/ACGACGCTCTTCCGATCTNNNNNNNNATCCATCAGGT | 190 | ATCCATCAGG | 382 |
| | TTTTTTTTTTTTTT | | | |
| shortDT_plate2_95 | /5Phos/ACGACGCTCTTCCGATCTNNNNNNNNCTCGGAGCAAT | 191 | CTCGGAGCAA | 383 |
| | TTTTTTTTTTTTTT | | | |
| shortDT_plate2_96 | /5Phos/ACGACGCTCTTCCGATCTNNNNNNNNGGCGGTTGACT | 192 | GGCGGTTGAC | 384 |
| | TTTTTTTTTTTTTT | | | |

TABLE 4
Random hexamer reverse transcription primer sequences

| | | SEQ ID | | SEQ ID |
|---|---|---|---|---|
| Name | Sequence | NO: | Barcode | NO: |
| randomN_plate1_01 | /5Phos/ACGACGCTCTTCCGATCTNNNNNNNNCGGTCAAGA | 385 | CGGTCAAGAA | 577 |
| | ANNNNNN | | | |
| randomN_plate1_02 | /5Phos/ACGACGCTCTTCCGATCTNNNNNNNNCGCTCCTAA | 386 | CGCTCCTAAC | 578 |
| | CNNNNNN | | | |
| randomN_plate1_03 | /5Phos/ACGACGCTCTTCCGATCTNNNNNNNNATCCATGAC | 387 | ATCCATGACT | 579 |
| | TNNNNNN | | | |
| randomN_plate1_04 | /5Phos/ACGACGCTCTTCCGATCTNNNNNNNNAACCTGGTC | 388 | AACCTGGTCT | 580 |
| | TNNNNNN | | | |
| randomN_plate1_05 | /5Phos/ACGACGCTCTTCCGATCTNNNNNNNNACCGAAGAC | 389 | ACCGAAGACC | 581 |
| | CNNNNNN | | | |
| randomN_plate1_06 | /5Phos/ACGACGCTCTTCCGATCTNNNNNNNNGGTACCGGC | 390 | GGTACCGGCA | 582 |
| | ANNNNNN | | | |
| randomN_plate1_07 | /5Phos/ACGACGCTCTTCCGATCTNNNNNNNNAAGCCAGTT | 391 | AAGCCAGTTA | 583 |
| | ANNNNNN | | | |
| randomN_plate1_08 | /5Phos/ACGACGCTCTTCCGATCTNNNNNNNNTCTTGCCGA | 392 | TCTTGCCGAC | 584 |
| | CNNNNNN | | | |
| randomN_plate1_09 | /5Phos/ACGACGCTCTTCCGATCTNNNNNNNNAAGACCGTT | 393 | AAGACCGTTG | 585 |
| | GNNNNNN | | | |
| randomN_plate1_10 | /5Phos/ACGACGCTCTTCCGATCTNNNNNNNNAGGTTAGCA | 394 | AGGTTAGCAT | 586 |
| | TNNNNNN | | | |
| randomN_plate1_11 | /5Phos/ACGACGCTCTTCCGATCTNNNNNNNNTTCGCCTCC | 395 | TTCGCCTCCA | 587 |
| | ANNNNNN | | | |
| randomN_plate1_12 | /5Phos/ACGACGCTCTTCCGATCTNNNNNNNNAGAGCCAA | 396 | AGAGCCAAGG | 588 |
| | GGNNNNNN | | | |
| randomN_plate1_13 | /5Phos/ACGACGCTCTTCCGATCTNNNNNNNNAATACCATC | 397 | AATACCATCC | 589 |
| | CNNNNNN | | | |
| randomN_plate1_14 | /5Phos/ACGACGCTCTTCCGATCTNNNNNNNNAGCTCTCCT | 398 | AGCTCTCCTC | 590 |
| | CNNNNNN | | | |
| randomN_plate1_15 | /5Phos/ACGACGCTCTTCCGATCTNNNNNNNNCTTGATTGC | 399 | CTTGATTGCC | 591 |
| | CNNNNNN | | | |
| randomN_plate1_16 | /5Phos/ACGACGCTCTTCCGATCTNNNNNNNNAGCTTATCC | 400 | AGCTTATCCG | 592 |
| | GNNNNNN | | | |
| randomN_plate1_17 | /5Phos/ACGACGCTCTTCCGATCTNNNNNNNNAAGAATCTG | 401 | AAGAATCTGA | 593 |
| | ANNNNNN | | | |
| randomN_plate1_18 | /5Phos/ACGACGCTCTTCCGATCTNNNNNNNNCATCTCTGC | 402 | CATCTCTGCA | 594 |
| | ANNNNNN | | | |
| randomN_plate1_19 | /5Phos/ACGACGCTCTTCCGATCTNNNNNNNNACCTGGCCA | 403 | ACCTGGCCAA | 595 |
| | ANNNNNN | | | |
| randomN_plate1_20 | /5Phos/ACGACGCTCTTCCGATCTNNNNNNNNTAACTGGTT | 404 | TAACTGGTTA | 596 |
| | ANNNNNN | | | |
| randomN_plate1_21 | /5Phos/ACGACGCTCTTCCGATCTNNNNNNNNTTGCTAACG | 405 | TTGCTAACGG | 597 |
| | GNNNNNN | | | |
| randomN_plate1_22 | /5Phos/ACGACGCTCTTCCGATCTNNNNNNNNACTAGAGA | 406 | ACTAGAGAGT | 598 |
| | GTNNNNNN | | | |
| randomN_plate1_23 | /5Phos/ACGACGCTCTTCCGATCTNNNNNNNNAATGCCGCT | 407 | AATGCCGCTT | 599 |
| | TNNNNNN | | | |
| randomN_plate1_24 | /5Phos/ACGACGCTCTTCCGATCTNNNNNNNNTATAGACGC | 408 | TATAGACGCA | 600 |
| | ANNNNNN | | | |
| randomN_plate1_25 | /5Phos/ACGACGCTCTTCCGATCTNNNNNNNNTCAATCGCA | 409 | TCAATCGCAT | 601 |
| | TNNNNNN | | | |
| randomN_plate1_26 | /5Phos/ACGACGCTCTTCCGATCTNNNNNNNNTTCTTAATA | 410 | TTCTTAATAA | 602 |
| | ANNNNNN | | | |
| randomN_plate1_27 | /5Phos/ACGACGCTCTTCCGATCTNNNNNNNNGTCCTAGAG | 411 | GTCCTAGAGG | 603 |
| | GNNNNNN | | | |
| randomN_plate1_28 | /5Phos/ACGACGCTCTTCCGATCTNNNNNNNNATATTGATA | 412 | ATATTGATAC | 604 |
| | CNNNNNN | | | |
| randomN_plate1_29 | /5Phos/ACGACGCTCTTCCGATCTNNNNNNNNCCGCTGCCA | 413 | CCGCTGCCAG | 605 |
| | GNNNNNN | | | |
| randomN_plate1_30 | /5Phos/ACGACGCTCTTCCGATCTNNNNNNNNCCTAGTACG | 414 | CCTAGTACGT | 606 |
| | TNNNNNN | | | |
| randomN_plate1_31 | /5Phos/ACGACGCTCTTCCGATCTNNNNNNNNCAATTACCG | 415 | CAATTACCGT | 607 |
| | TNNNNNN | | | |
| randomN_plate1_32 | /5Phos/ACGACGCTCTTCCGATCTNNNNNNNNGGCCGTAGT | 416 | GGCCGTAGTC | 608 |
| | CNNNNNN | | | |
| randomN_plate1_33 | /5Phos/ACGACGCTCTTCCGATCTNNNNNNNNCGATTACGG | 417 | CGATTACGGC | 609 |
| | CNNNNNN | | | |
| randomN_plate1_34 | /5Phos/ACGACGCTCTTCCGATCTNNNNNNNNTAATGAACG | 418 | TAATGAACGA | 610 |
| | ANNNNNN | | | |
| randomN_plate1_35 | /5Phos/ACGACGCTCTTCCGATCTNNNNNNNNCCGTTCCTT | 419 | CCGTTCCTTA | 611 |
| | ANNNNNN | | | |
| randomN_plate1_36 | /5Phos/ACGACGCTCTTCCGATCTNNNNNNNNGGTACCATA | 420 | GGTACCATAT | 612 |
| | TNNNNNN | | | |
| randomN_plate1_37 | /5Phos/ACGACGCTCTTCCGATCTNNNNNNNNCCGATTCGC | 421 | CCGATTCGCA | 613 |
| | ANNNNNN | | | |
| randomN_plate1_38 | /5Phos/ACGACGCTCTTCCGATCTNNNNNNNNATGGCTCTG | 422 | ATGGCTCTGC | 614 |
| | CNNNNNN | | | |
| randomN_plate1_39 | /5Phos/ACGACGCTCTTCCGATCTNNNNNNNNGTATAATAC | 423 | GTATAATACG | 615 |
| | GNNNNNN | | | |
| randomN_plate1_40 | /5Phos/ACGACGCTCTTCCGATCTNNNNNNNNATCAGCAAG | 424 | ATCAGCAAGT | 616 |
| | TNNNNNN | | | |
| randomN_plate1_41 | /5Phos/ACGACGCTCTTCCGATCTNNNNNNNNGGCGAACTC | 425 | GGCGAACTCG | 617 |
| | GNNNNNN | | | |
| randomN_plate1_42 | /5Phos/ACGACGCTCTTCCGATCTNNNNNNNNTTAATTGAA | 426 | TTAATTGAAT | 618 |
| | TNNNNNN | | | |
| randomN_plate1_43 | /5Phos/ACGACGCTCTTCCGATCTNNNNNNNNTTAGGACCG | 427 | TTAGGACCGG | 619 |
| | GNNNNNN | | | |
| randomN_plate1_44 | /5Phos/ACGACGCTCTTCCGATCTNNNNNNNNAAGTAAGA | 428 | AAGTAAGAGC | 620 |
| | GCNNNNNN | | | |
| randomN_plate1_45 | /5Phos/ACGACGCTCTTCCGATCTNNNNNNNNCCTTGGTCC | 429 | CCTTGGTCCA | 621 |
| | ANNNNNN | | | |
| randomN_plate1_46 | /5Phos/ACGACGCTCTTCCGATCTNNNNNNNNCATCAGAAT | 430 | CATCAGAATG | 622 |
| | GNNNNNN | | | |
| randomN_plate1_47 | /5Phos/ACGACGCTCTTCCGATCTNNNNNNNNTTATAGCAG | 431 | TTATAGCAGA | 623 |
| | ANNNNNN | | | |
| randomN_plate1_48 | /5Phos/ACGACGCTCTTCCGATCTNNNNNNNNTTACTTGGA | 432 | TTACTTGGAA | 624 |
| | ANNNNNN | | | |
| randomN_plate1_49 | /5Phos/ACGACGCTCTTCCGATCTNNNNNNNNGCTCAGCCG | 433 | GCTCAGCCGG | 625 |
| | GNNNNNN | | | |
| randomN_plate1_50 | /5Phos/ACGACGCTCTTCCGATCTNNNNNNNNACGTCCGCA | 434 | ACGTCCGCAG | 626 |
| | GNNNNNN | | | |
| randomN_plate1_51 | /5Phos/ACGACGCTCTTCCGATCTNNNNNNNNTTGACTGAC | 435 | TTGACTGACG | 627 |
| | GNNNNNN | | | |
| randomN_plate1_52 | /5Phos/ACGACGCTCTTCCGATCTNNNNNNNNTTGCGAGGC | 436 | TTGCGAGGCA | 628 |
| | ANNNNNN | | | |
| randomN_plate1_53 | /5Phos/ACGACGCTCTTCCGATCTNNNNNNNNTTCCAACCG | 437 | TTCCAACCGC | 629 |
| | CNNNNNN | | | |
| randomN_plate1_54 | /5Phos/ACGACGCTCTTCCGATCTNNNNNNNNTAACCTTCG | 438 | TAACCTTCGG | 630 |
| | GNNNNNN | | | |
| randomN_plate1_55 | /5Phos/ACGACGCTCTTCCGATCTNNNNNNNNTCAAGCCGA | 439 | TCAAGCCGAT | 631 |
| | TNNNNNN | | | |
| randomN_plate1_56 | /5Phos/ACGACGCTCTTCCGATCTNNNNNNNNCTTGCAACC | 440 | CTTGCAACCT | 632 |
| | TNNNNNN | | | |
| randomN_plate1_57 | /5Phos/ACGACGCTCTTCCGATCTNNNNNNNNCCATCGCGA | 441 | CCATCGCGAA | 633 |
| | ANNNNNN | | | |
| randomN_plate1_58 | /5Phos/ACGACGCTCTTCCGATCTNNNNNNNNTAGACTTCT | 442 | TAGACTTCTT | 634 |
| | TNNNNNN | | | |
| randomN_plate1_59 | /5Phos/ACGACGCTCTTCCGATCTNNNNNNNNGTCCTTAAG | 443 | GTCCTTAAGA | 635 |
| | ANNNNNN | | | |
| randomN_plate1_60 | /5Phos/ACGACGCTCTTCCGATCTNNNNNNNNAGTAACGGT | 444 | AGTAACGGTC | 636 |
| | CNNNNNN | | | |
| randomN_plate1_61 | /5Phos/ACGACGCTCTTCCGATCTNNNNNNNNGTTCGTCAG | 445 | GTTCGTCAGA | 637 |
| | ANNNNNN | | | |
| randomN_plate1_62 | /5Phos/ACGACGCTCTTCCGATCTNNNNNNNNCGCCTAATG | 446 | CGCCTAATGC | 638 |
| | CNNNNNN | | | |
| randomN_plate1_63 | /5Phos/ACGACGCTCTTCCGATCTNNNNNNNNACCGGAATT | 447 | ACCGGAATTA | 639 |
| | ANNNNNN | | | |
| randomN_plate1_64 | /5Phos/ACGACGCTCTTCCGATCTNNNNNNNNTAGGCCATA | 448 | TAGGCCATAG | 640 |
| | GNNNNNN | | | |
| randomN_plate1_65 | /5Phos/ACGACGCTCTTCCGATCTNNNNNNNNTAACTCTTA | 449 | TAACTCTTAG | 641 |
| | GNNNNNN | | | |
| randomN_plate1_66 | /5Phos/ACGACGCTCTTCCGATCTNNNNNNNNTATGAGTTA | 450 | TATGAGTTAA | 642 |
| | ANNNNNN | | | |
| randomN_plate1_67 | /5Phos/ACGACGCTCTTCCGATCTNNNNNNNNTATCATGAT | 451 | TATCATGATC | 643 |
| | CNNNNNN | | | |
| randomN_plate1_68 | /5Phos/ACGACGCTCTTCCGATCTNNNNNNNNGAGCATATG | 452 | GAGCATATGG | 644 |
| | GNNNNNN | | | |
| randomN_plate1_69 | /5Phos/ACGACGCTCTTCCGATCTNNNNNNNNTAACGATCC | 453 | TAACGATCCA | 645 |
| | ANNNNNN | | | |
| randomN_plate1_70 | /5Phos/ACGACGCTCTTCCGATCTNNNNNNNNCGGCGTAAC | 454 | CGGCGTAACT | 646 |
| | TNNNNNN | | | |
| randomN_plate1_71 | /5Phos/ACGACGCTCTTCCGATCTNNNNNNNNCGTCGCAGC | 455 | CGTCGCAGCC | 647 |
| | CNNNNNN | | | |
| randomN_plate1_72 | /5Phos/ACGACGCTCTTCCGATCTNNNNNNNNGTAGCTCCA | 456 | GTAGCTCCAT | 648 |
| | TNNNNNN | | | |
| randomN_plate1_73 | /5Phos/ACGACGCTCTTCCGATCTNNNNNNNNTTGCCTTGG | 457 | TTGCCTTGGC | 649 |
| | CNNNNNN | | | |
| randomN_plate1_74 | /5Phos/ACGACGCTCTTCCGATCTNNNNNNNNTGCTAATTC | 458 | TGCTAATTCT | 650 |
| | TNNNNNN | | | |
| randomN_plate1_75 | /5Phos/ACGACGCTCTTCCGATCTNNNNNNNNGTCCTACTT | 459 | GTCCTACTTG | 651 |
| | GNNNNNN | | | |
| randomN_plate1_76 | /5Phos/ACGACGCTCTTCCGATCTNNNNNNNNGGTAGGTTA | 460 | GGTAGGTTAG | 652 |
| | GNNNNNN | | | |
| randomN_plate1_77 | /5Phos/ACGACGCTCTTCCGATCTNNNNNNNNGAGCATCAT | 461 | GAGCATCATT | 653 |
| | TNNNNNN | | | |
| randomN_plate1_78 | /5Phos/ACGACGCTCTTCCGATCTNNNNNNNNCCGCTCCGG | 462 | CCGCTCCGGC | 654 |
| | CNNNNNN | | | |
| randomN_plate1_79 | /5Phos/ACGACGCTCTTCCGATCTNNNNNNNNTTCTTCCGG | 463 | TTCTTCCGGT | 655 |
| | TNNNNNN | | | |
| randomN_plate1_80 | /5Phos/ACGACGCTCTTCCGATCTNNNNNNNNAGGAGAGA | 464 | AGGAGAGAAC | 656 |
| | ACNNNNNN | | | |
| randomN_plate1_81 | /5Phos/ACGACGCTCTTCCGATCTNNNNNNNNTAACTCAAT | 465 | TAACTCAATT | 657 |
| | TNNNNNN | | | |
| randomN_plate1_82 | /5Phos/ACGACGCTCTTCCGATCTNNNNNNNNACTATAGGT | 466 | ACTATAGGTT | 658 |
| | TNNNNNN | | | |
| randomN_plate1_83 | /5Phos/ACGACGCTCTTCCGATCTNNNNNNNNCAAGATGCC | 467 | CAAGATGCCG | 659 |
| | GNNNNNN | | | |
| randomN_plate1_84 | /5Phos/ACGACGCTCTTCCGATCTNNNNNNNNAACGTCTAG | 468 | AACGTCTAGT | 660 |
| | TNNNNNN | | | |
| randomN_plate1_85 | /5Phos/ACGACGCTCTTCCGATCTNNNNNNNNAGGTATACT | 469 | AGGTATACTC | 661 |
| | CNNNNNN | | | |
| randomN_plate1_86 | /5Phos/ACGACGCTCTTCCGATCTNNNNNNNNTTCATAGGA | 470 | TTCATAGGAC | 662 |
| | CNNNNNN | | | |
| randomN_plate1_87 | /5Phos/ACGACGCTCTTCCGATCTNNNNNNNNGGAGGCCTC | 471 | GGAGGCCTCC | 663 |
| | CNNNNNN | | | |
| randomN_plate1_88 | /5Phos/ACGACGCTCTTCCGATCTNNNNNNNNTTCAATATA | 472 | TTCAATATAA | 664 |
| | ANNNNNN | | | |
| randomN_plate1_89 | /5Phos/ACGACGCTCTTCCGATCTNNNNNNNNACGTCATAT | 473 | ACGTCATATA | 665 |
| | ANNNNNN | | | |
| randomN_plate1_90 | /5Phos/ACGACGCTCTTCCGATCTNNNNNNNNTTGACCAGG | 474 | TTGACCAGGA | 666 |
| | ANNNNNN | | | |
| randomN_plate1_91 | /5Phos/ACGACGCTCTTCCGATCTNNNNNNNNCGGTTGCGC | 475 | CGGTTGCGCG | 667 |
| | GNNNNNN | | | |
| randomN_plate1_92 | /5Phos/ACGACGCTCTTCCGATCTNNNNNNNNCAAGGAGG | 476 | CAAGGAGGTC | 668 |
| | TCNNNNNN | | | |
| randomN_plate1_93 | /5Phos/ACGACGCTCTTCCGATCTNNNNNNNNTTACGATGA | 477 | TTACGATGAA | 669 |
| | ANNNNNN | | | |
| randomN_plate1_94 | /5Phos/ACGACGCTCTTCCGATCTNNNNNNNNTTGCTGGCA | 478 | TTGCTGGCAT | 670 |
| | TNNNNNN | | | |
| randomN_plate1_95 | /5Phos/ACGACGCTCTTCCGATCTNNNNNNNNGAGGCATCA | 479 | GAGGCATCAA | 671 |
| | ANNNNNN | | | |
| randomN_plate1_96 | /5Phos/ACGACGCTCTTCCGATCTNNNNNNNNATTCGACCA | 480 | ATTCGACCAA | 672 |
| | ANNNNNN | | | |
| randomN_plate2_01 | /5Phos/ACGACGCTCTTCCGATCTNNNNNNNNGCCGTATGC | 481 | GCCGTATGCT | 673 |
| | TNNNNNN | | | |
| randomN_plate2_02 | /5Phos/ACGACGCTCTTCCGATCTNNNNNNNNCTGAACTGG | 482 | CTGAACTGGT | 674 |
| | TNNNNNN | | | |
| randomN_plate2_03 | /5Phos/ACGACGCTCTTCCGATCTNNNNNNNNCATAACCAG | 483 | CATAACCAGC | 675 |
| | CNNNNNN | | | |
| randomN_plate2_04 | /5Phos/ACGACGCTCTTCCGATCTNNNNNNNNAAGTTGCCA | 484 | AAGTTGCCAT | 676 |
| | TNNNNNN | | | |
| randomN_plate2_05 | /5Phos/ACGACGCTCTTCCGATCTNNNNNNNNAGGCCGCTC | 485 | AGGCCGCTCG | 677 |
| | GNNNNNN | | | |
| randomN_plate2_06 | /5Phos/ACGACGCTCTTCCGATCTNNNNNNNNAGGTAATAG | 486 | AGGTAATAGG | 678 |
| | GNNNNNN | | | |
| randomN_plate2_07 | /5Phos/ACGACGCTCTTCCGATCTNNNNNNNNGTACTAGTA | 487 | GTACTAGTAA | 679 |
| | ANNNNNN | | | |
| randomN_plate2_08 | /5Phos/ACGACGCTCTTCCGATCTNNNNNNNNGCGCGGTA | 488 | GCGCGGTAGT | 680 |
| | GTNNNNNN | | | |
| randomN_plate2_09 | /5Phos/ACGACGCTCTTCCGATCTNNNNNNNNCTGGATTAG | 489 | CTGGATTAGT | 681 |
| | TNNNNNN | | | |
| randomN_plate2_10 | /5Phos/ACGACGCTCTTCCGATCTNNNNNNNNTTGGATCCT | 490 | TTGGATCCTT | 682 |
| | TNNNNNN | | | |
| randomN_plate2_11 | /5Phos/ACGACGCTCTTCCGATCTNNNNNNNNTTGGAATCT | 491 | TTGGAATCTC | 683 |
| | CNNNNNN | | | |
| randomN_plate2_12 | /5Phos/ACGACGCTCTTCCGATCTNNNNNNNNACCTGGACG | 492 | ACCTGGACGC | 684 |
| | CNNNNNN | | | |
| randomN_plate2_13 | /5Phos/ACGACGCTCTTCCGATCTNNNNNNNNCCTGACGTT | 493 | CCTGACGTTC | 685 |
| | CNNNNNN | | | |
| randomN_plate2_14 | /5Phos/ACGACGCTCTTCCGATCTNNNNNNNNGCGTTCAGC | 494 | GCGTTCAGCT | 686 |
| | TNNNNNN | | | |
| randomN_plate2_15 | /5Phos/ACGACGCTCTTCCGATCTNNNNNNNNTTAGCAATA | 495 | TTAGCAATAA | 687 |
| | ANNNNNN | | | |
| randomN_plate2_16 | /5Phos/ACGACGCTCTTCCGATCTNNNNNNNNTTGATGCTA | 496 | TTGATGCTAT | 688 |
| | TNNNNNN | | | |
| randomN_plate2_17 | /5Phos/ACGACGCTCTTCCGATCTNNNNNNNNCTCTGCGGC | 497 | CTCTGCGGCA | 689 |
| | ANNNNNN | | | |
| randomN_plate2_18 | /5Phos/ACGACGCTCTTCCGATCTNNNNNNNNAATAATACC | 498 | AATAATACCA | 690 |
| | ANNNNNN | | | |
| randomN_plate2_19 | /5Phos/ACGACGCTCTTCCGATCTNNNNNNNNACGCCGTTC | 499 | ACGCCGTTCA | 691 |
| | ANNNNNN | | | |
| randomN_plate2_20 | /5Phos/ACGACGCTCTTCCGATCTNNNNNNNNTTCGCTTAC | 500 | TTCGCTTACG | 692 |
| | GNNNNNN | | | |
| randomN_plate2_21 | /5Phos/ACGACGCTCTTCCGATCTNNNNNNNNTACGGCTAC | 501 | TACGGCTACG | 693 |
| | GNNNNNN | | | |
| randomN_plate2_22 | /5Phos/ACGACGCTCTTCCGATCTNNNNNNNNTTCTTATCG | 502 | TTCTTATCGA | 694 |
| | ANNNNNN | | | |
| randomN_plate2_23 | /5Phos/ACGACGCTCTTCCGATCTNNNNNNNNTTCCATGGC | 503 | TTCCATGGCA | 695 |
| | ANNNNNN | | | |
| randomN_plate2_24 | /5Phos/ACGACGCTCTTCCGATCTNNNNNNNNAAGTAGTCA | 504 | AAGTAGTCAG | 696 |
| | GNNNNNN | | | |
| randomN_plate2_25 | /5Phos/ACGACGCTCTTCCGATCTNNNNNNNNTCAGCTCTA | 505 | TCAGCTCTAA | 697 |
| | ANNNNNN | | | |
| randomN_plate2_26 | /5Phos/ACGACGCTCTTCCGATCTNNNNNNNNCGAATAGAT | 506 | CGAATAGATG | 698 |
| | GNNNNNN | | | |
| randomN_plate2_27 | /5Phos/ACGACGCTCTTCCGATCTNNNNNNNNCGGAGATCC | 507 | CGGAGATCCG | 699 |
| | GNNNNNN | | | |
| randomN_plate2_28 | /5Phos/ACGACGCTCTTCCGATCTNNNNNNNNACCGCAGAA | 508 | ACCGCAGAAT | 700 |
| | TNNNNNN | | | |
| randomN_plate2_29 | /5Phos/ACGACGCTCTTCCGATCTNNNNNNNNTCTCCTATA | 509 | TCTCCTATAA | 701 |
| | ANNNNNN | | | |
| randomN_plate2_30 | /5Phos/ACGACGCTCTTCCGATCTNNNNNNNNCAACCTATA | 510 | CAACCTATAT | 702 |
| | TNNNNNN | | | |
| randomN_plate2_31 | /5Phos/ACGACGCTCTTCCGATCTNNNNNNNNAGTCGAGA | 511 | AGTCGAGAAG | 703 |
| | AGNNNNNN | | | |
| randomN_plate2_32 | /5Phos/ACGACGCTCTTCCGATCTNNNNNNNNAAGACGGC | 512 | AAGACGGCCA | 704 |
| | CANNNNNN | | | |
| randomN_plate2_33 | /5Phos/ACGACGCTCTTCCGATCTNNNNNNNNGCCAACGCC | 513 | GCCAACGCCA | 705 |
| | ANNNNNN | | | |
| randomN_plate2_34 | /5Phos/ACGACGCTCTTCCGATCTNNNNNNNNTCTACCATT | 514 | TCTACCATTA | 706 |
| | ANNNNNN | | | |
| randomN_plate2_35 | /5Phos/ACGACGCTCTTCCGATCTNNNNNNNNCTTGCGGTC | 515 | CTTGCGGTCT | 707 |
| | TNNNNNN | | | |
| randomN_plate2_36 | /5Phos/ACGACGCTCTTCCGATCTNNNNNNNNTTACGTATA | 516 | TTACGTATAC | 708 |
| | CNNNNNN | | | |
| randomN_plate2_37 | /5Phos/ACGACGCTCTTCCGATCTNNNNNNNNCGATTGGTT | 517 | CGATTGGTTA | 709 |
| | ANNNNNN | | | |
| randomN_plate2_38 | /5Phos/ACGACGCTCTTCCGATCTNNNNNNNNACTTAACTA | 518 | ACTTAACTAG | 710 |
| | GNNNNNN | | | |
| randomN_plate2_39 | /5Phos/ACGACGCTCTTCCGATCTNNNNNNNNGCAGACCG | 519 | GCAGACCGGT | 711 |
| | GTNNNNNN | | | |
| randomN_plate2_40 | /5Phos/ACGACGCTCTTCCGATCTNNNNNNNNTGAGTCCAG | 520 | TGAGTCCAGA | 712 |
| | ANNNNNN | | | |
| randomN_plate2_41 | /5Phos/ACGACGCTCTTCCGATCTNNNNNNNNTGGAGAATT | 521 | TGGAGAATTC | 713 |
| | CNNNNNN | | | |
| randomN_plate2_42 | /5Phos/ACGACGCTCTTCCGATCTNNNNNNNNACCAGCCTT | 522 | ACCAGCCTTA | 714 |
| | ANNNNNN | | | |
| randomN_plate2_43 | /5Phos/ACGACGCTCTTCCGATCTNNNNNNNNGGCGAGCTT | 523 | GGCGAGCTTA | 715 |
| | ANNNNNN | | | |
| randomN_plate2_44 | /5Phos/ACGACGCTCTTCCGATCTNNNNNNNNTCGAGGAGT | 524 | TCGAGGAGTA | 716 |
| | ANNNNNN | | | |
| randomN_plate2_45 | /5Phos/ACGACGCTCTTCCGATCTNNNNNNNNCCTTACTCCT | 525 | CCTTACTCCT | 717 |
| | NNNNNN | | | |
| randomN_plate2_46 | /5Phos/ACGACGCTCTTCCGATCTNNNNNNNNTCAGACGAA | 526 | TCAGACGAAC | 718 |
| | CNNNNNN | | | |
| randomN_plate2_47 | /5Phos/ACGACGCTCTTCCGATCTNNNNNNNNCCGTCCAGT | 527 | CCGTCCAGTA | 719 |
| | ANNNNNN | | | |
| randomN_plate2_48 | /5Phos/ACGACGCTCTTCCGATCTNNNNNNNNGTTCCGCTA | 528 | GTTCCGCTAA | 720 |
| | ANNNNNN | | | |
| randomN_plate2_49 | /5Phos/ACGACGCTCTTCCGATCTNNNNNNNNCAGATTCGA | 529 | CAGATTCGAT | 721 |
| | TNNNNNN | | | |
| randomN_plate2_50 | /5Phos/ACGACGCTCTTCCGATCTNNNNNNNNTGCATATAA | 530 | TGCATATAAC | 722 |
| | CNNNNNN | | | |
| randomN_plate2_51 | /5Phos/ACGACGCTCTTCCGATCTNNNNNNNNTAGGCAGAT | 531 | TAGGCAGATA | 723 |
| | ANNNNNN | | | |
| randomN_plate2_52 | /5Phos/ACGACGCTCTTCCGATCTNNNNNNNNTATGCCGAG | 532 | TATGCCGAGT | 724 |
| | TNNNNNN | | | |
| randomN_plate2_53 | /5Phos/ACGACGCTCTTCCGATCTNNNNNNNNATAGTCGTA | 533 | ATAGTCGTAG | 725 |
| | GNNNNNN | | | |
| randomN_plate2_54 | /5Phos/ACGACGCTCTTCCGATCTNNNNNNNNGGATGCAG | 534 | GGATGCAGCA | 726 |
| | CANNNNNN | | | |
| randomN_plate2_55 | /5Phos/ACGACGCTCTTCCGATCTNNNNNNNNCCGCTATAT | 535 | CCGCTATATT | 727 |
| | TNNNNNN | | | |
| randomN_plate2_56 | /5Phos/ACGACGCTCTTCCGATCTNNNNNNNNATCGAGTCG | 536 | ATCGAGTCGC | 728 |
| | CNNNNNN | | | |
| randomN_plate2_57 | /5Phos/ACGACGCTCTTCCGATCTNNNNNNNNGCGACGCA | 537 | GCGACGCAGA | 729 |
| | GANNNNNN | | | |
| randomN_plate2_58 | /5Phos/ACGACGCTCTTCCGATCTNNNNNNNNAATGGTCGA | 538 | AATGGTCGAC | 730 |
| | CNNNNNN | | | |
| randomN_plate2_59 | /5Phos/ACGACGCTCTTCCGATCTNNNNNNNNTGGAACTAG | 539 | TGGAACTAGA | 731 |
| | ANNNNNN | | | |
| randomN_plate2_60 | /5Phos/ACGACGCTCTTCCGATCTNNNNNNNNGTCCAACTC | 540 | GTCCAACTCA | 732 |
| | ANNNNNN | | | |
| randomN_plate2_61 | /5Phos/ACGACGCTCTTCCGATCTNNNNNNNNGTTATGGAT | 541 | GTTATGGATC | 733 |
| | CNNNNNN | | | |
| randomN_plate2_62 | /5Phos/ACGACGCTCTTCCGATCTNNNNNNNNTTATAAGAA | 542 | TTATAAGAAC | 734 |
| | CNNNNNN | | | |
| randomN_plate2_63 | /5Phos/ACGACGCTCTTCCGATCTNNNNNNNNCAAGCTTCA | 543 | CAAGCTTCAT | 735 |
| | TNNNNNN | | | |
| randomN_plate2_64 | /5Phos/ACGACGCTCTTCCGATCTNNNNNNNNCTGATTAAG | 544 | CTGATTAAGA | 736 |
| | ANNNNNN | | | |
| randomN_plate2_65 | /5Phos/ACGACGCTCTTCCGATCTNNNNNNNNTACTTACTT | 545 | TACTTACTTA | 737 |
| | ANNNNNN | | | |
| randomN_plate2_66 | /5Phos/ACGACGCTCTTCCGATCTNNNNNNNNGGATCTGCA | 546 | GGATCTGCAG | 738 |
| | GNNNNNN | | | |
| randomN_plate2_67 | /5Phos/ACGACGCTCTTCCGATCTNNNNNNNNATGCAATAT | 547 | ATGCAATATG | 739 |
| | GNNNNNN | | | |
| randomN_plate2_68 | /5Phos/ACGACGCTCTTCCGATCTNNNNNNNNTTCCTAGAC | 548 | TTCCTAGACC | 740 |
| | CNNNNNN | | | |
| randomN_plate2_69 | /5Phos/ACGACGCTCTTCCGATCTNNNNNNNNACTGCCGAT | 549 | ACTGCCGATA | 741 |
| | ANNNNNN | | | |
| randomN_plate2_70 | /5Phos/ACGACGCTCTTCCGATCTNNNNNNNNTCCAGAAGG | 550 | TCCAGAAGGT | 742 |
| | TNNNNNN | | | |
| randomN_plate2_71 | /5Phos/ACGACGCTCTTCCGATCTNNNNNNNNTTCAAGACC | 551 | TTCAAGACCA | 743 |
| | ANNNNNN | | | |
| randomN_plate2_72 | /5Phos/ACGACGCTCTTCCGATCTNNNNNNNNTATTACTCA | 552 | TATTACTCAT | 744 |
| | TNNNNNN | | | |
| randomN_plate2_73 | /5Phos/ACGACGCTCTTCCGATCTNNNNNNNNAACTGATCT | 553 | AACTGATCTT | 745 |
| | TNNNNNN | | | |
| randomN_plate2_74 | /5Phos/ACGACGCTCTTCCGATCTNNNNNNNNCCGCGGACC | 554 | CCGCGGACCG | 746 |
| | GNNNNNN | | | |
| randomN_plate2_75 | /5Phos/ACGACGCTCTTCCGATCTNNNNNNNNAATACGCAG | 555 | AATACGCAGG | 747 |
| | GNNNNNN | | | |
| randomN_plate2_76 | /5Phos/ACGACGCTCTTCCGATCTNNNNNNNNGGTCGCGTC | 556 | GGTCGCGTCA | 748 |
| | ANNNNNN | | | |
| randomN_plate2_77 | /5Phos/ACGACGCTCTTCCGATCTNNNNNNNNAATTATCAG | 557 | AATTATCAGC | 749 |
| | CNNNNNN | | | |
| randomN_plate2_78 | /5Phos/ACGACGCTCTTCCGATCTNNNNNNNNCAGCTATCG | 558 | CAGCTATCGT | 750 |
| | TNNNNNN | | | |
| randomN_plate2_79 | /5Phos/ACGACGCTCTTCCGATCTNNNNNNNNATTGCGCTG | 559 | ATTGCGCTGA | 751 |
| | ANNNNNN | | | |
| randomN_plate2_80 | /5Phos/ACGACGCTCTTCCGATCTNNNNNNNNTTGGTAGGC | 560 | TTGGTAGGCG | 752 |
| | GNNNNNN | | | |
| randomN_plate2_81 | /5Phos/ACGACGCTCTTCCGATCTNNNNNNNNAGCTAAGGT | 561 | AGCTAAGGTA | 753 |
| | ANNNNNN | | | |
| randomN_plate2_82 | /5Phos/ACGACGCTCTTCCGATCTNNNNNNNNTCGTAGAGA | 562 | TCGTAGAGAA | 754 |
| | ANNNNNN | | | |
| randomN_plate2_83 | /5Phos/ACGACGCTCTTCCGATCTNNNNNNNNTGATGGCCT | 563 | TGATGGCCTT | 755 |
| | TNNNNNN | | | |
| randomN_plate2_84 | /5Phos/ACGACGCTCTTCCGATCTNNNNNNNNTGGAAGTAC | 564 | TGGAAGTACC | 756 |
| | CNNNNNN | | | |
| randomN_plate2_85 | /5Phos/ACGACGCTCTTCCGATCTNNNNNNNNCTCCAAGGA | 565 | CTCCAAGGAT | 757 |
| | TNNNNNN | | | |
| randomN_plate2_86 | /5Phos/ACGACGCTCTTCCGATCTNNNNNNNNAGATATATC | 566 | AGATATATCG | 758 |
| | GNNNNNN | | | |
| randomN_plate2_87 | /5Phos/ACGACGCTCTTCCGATCTNNNNNNNNCATGCTGGT | 567 | CATGCTGGTT | 759 |
| | TNNNNNN | | | |
| randomN_plate2_88 | /5Phos/ACGACGCTCTTCCGATCTNNNNNNNNTCCTCGAGT | 568 | TCCTCGAGTC | 760 |
| | CNNNNNN | | | |
| randomN_plate2_89 | /5Phos/ACGACGCTCTTCCGATCTNNNNNNNNGCAAGGAA | 569 | GCAAGGAATA | 761 |
| | TANNNNNN | | | |
| randomN_plate2_90 | /5Phos/ACGACGCTCTTCCGATCTNNNNNNNNGGCATAGCT | 570 | GGCATAGCTT | 762 |
| | TNNNNNN | | | |
| randomN_plate2_91 | /5Phos/ACGACGCTCTTCCGATCTNNNNNNNNCTACGGTAG | 571 | CTACGGTAGC | 763 |
| | CNNNNNN | | | |
| randomN_plate2_92 | /5Phos/ACGACGCTCTTCCGATCTNNNNNNNNAGTAAGCAT | 572 | AGTAAGCATA | 764 |
| | ANNNNNN | | | |
| randomN_plate2_93 | /5Phos/ACGACGCTCTTCCGATCTNNNNNNNNCGCCTCGAA | 573 | CGCCTCGAAC | 765 |
| | CNNNNNN | | | |
| randomN_plate2_94 | /5Phos/ACGACGCTCTTCCGATCTNNNNNNNNTTAGGATCT | 574 | TTAGGATCTA | 766 |
| | ANNNNNN | | | |
| randomN_plate2_95 | /5Phos/ACGACGCTCTTCCGATCTNNNNNNNNACTACTGAA | 575 | ACTACTGAAG | 767 |
| | GNNNNNN | | | |
| randomN_plate2_96 | /5Phos/ACGACGCTCTTCCGATCTNNNNNNNNAATCTGGAG | 576 | AATCTGGAGT | 768 |
| | TNNNNNN | | | |

### Pool/Centrifuge/Resuspend/Redistribute (15 m)

[0512] Add 10 μL NBB into each well, pool solution, and move solution into a 15 mL tube. Centrifuge the tube for 3 minutes, 1000 g at 4 C.
[0513] Use a pipet to aspirate supernatant. Resuspend nuclei in 1 mL NBB and then move into a 1.5 mL microcentrifuge tube. Centrifuge the tube for 3 minutes, 1000 g at 4 C to pellet the nuclei.

### Ligation (1 h)

[0514] Dump the supernatant. Resuspend the cells in 950 μL NBB. Distribute the nuclei into four PCR plates, with 2.5 μL of the solution going into each well.
[0515] To each well, add 1 μL of the appropriate DNA ligation primer (Table 5)/adaptor complex (3.125 μM).
[0516] Create a mixture of:
[0517] 210 μL 10× T4 Ligation Buffer
[0518] 21 μL SUPERase In RNase Inhibitor
[0519] 210 μL T4 DNA Ligase
[0520] 189 μL Nuclease Free Water
   [0521] Add 1.5 μL of the mixture to each of the PCR plate wells.
[0522] Incubate plates for 30 minutes at room temperature with gentle shaking (300 rpm with Thermomixer, 50 rpm on Fisherbrand Nutating Mixer).
[0523] From an aliquot of 0.5M EDTA, dilute to 18 mM EDTA. Add 1 μL EDTA (18 mM) into each well and pool all solution into a 15 mL tube.

TABLE 5
Ligation primer sequences (plate 1)

| | | SEQ ID | | SEQ ID |
|---|---|---|---|---|
| Name | Sequence | NO: | Barcode | NO: |
| EasySci- | AATGATACGGCGACCACCGAGATCTACACCCG | 769 | CCGCGGCTCA | 1153 |
| RNA_ligation1_01 | CGGCTCAACACTCTTTCCCTAC | | | |
| EasySci- | AATGATACGGCGACCACCGAGATCTACACGGC | 770 | GGCTCCTCGT | 1154 |
| RNA_ligation1_02 | TCCTCGTACACTCTTTCCCTAC | | | |
| EasySci- | AATGATACGGCGACCACCGAGATCTACACGTT | 771 | GTTACGCAAG | 1155 |
| RNA_ligation1_03 | ACGCAAGACACTCTTTCCCTAC | | | |
| EasySci- | AATGATACGGCGACCACCGAGATCTACACAGC | 772 | AGCCGGTACC | 1156 |
| RNA_ligation1_04 | CGGTACCACACTCTTTCCCTAC | | | |
| EasySci- | AATGATACGGCGACCACCGAGATCTACACACC | 773 | ACCTCTATCT | 1157 |
| RNA_ligation1_05 | TCTATCTACACTCTTTCCCTAC | | | |
| EasySci- | AATGATACGGCGACCACCGAGATCTACACGGA | 774 | GGACTACTAC | 1158 |
| RNA_ligation1_06 | CTACTACACACTCTTTCCCTAC | | | |
| EasySci- | AATGATACGGCGACCACCGAGATCTACACGTA | 775 | GTATCATCGA | 1159 |
| RNA_ligation1_07 | TCATCGAACACTCTTTCCCTAC | | | |
| EasySci- | AATGATACGGCGACCACCGAGATCTACACCCG | 776 | CCGCGATTAT | 1160 |
| RNA_ligation1_08 | CGATTATACACTCTTTCCCTAC | | | |
| EasySci- | AATGATACGGCGACCACCGAGATCTACACATT | 777 | ATTCAGGTAC | 1161 |
| RNA_ligation1_09 | CAGGTACACACTCTTTCCCTAC | | | |
| EasySci- | AATGATACGGCGACCACCGAGATCTACACATG | 778 | ATGGAATTGG | 1162 |
| RNA_ligation1_10 | GAATTGGACACTCTTTCCCTAC | | | |
| EasySci- | AATGATACGGCGACCACCGAGATCTACACGAC | 779 | GACGAAGCGT | 1163 |
| RNA_ligation1_11 | GAAGCGTACACTCTTTCCCTAC | | | |
| EasySci- | AATGATACGGCGACCACCGAGATCTACACCTT | 780 | CTTGCAGTAG | 1164 |
| RNA_ligation1_12 | GCAGTAGACACTCTTTCCCTAC | | | |
| EasySci- | AATGATACGGCGACCACCGAGATCTACACCTT | 781 | CTTGGTAATG | 1165 |
| RNA_ligation1_13 | GGTAATGACACTCTTTCCCTAC | | | |
| EasySci- | AATGATACGGCGACCACCGAGATCTACACCAA | 782 | CAAGTCGACC | 1166 |
| RNA_ligation1_14 | GTCGACCACACTCTTTCCCTAC | | | |
| EasySci- | AATGATACGGCGACCACCGAGATCTACACTAA | 783 | TAACGAATTG | 1167 |
| RNA_ligation1_15 | CGAATTGACACTCTTTCCCTAC | | | |
| EasySci- | AATGATACGGCGACCACCGAGATCTACACTGA | 784 | TGAGAACCAA | 1168 |
| RNA_ligation1_16 | GAACCAAACACTCTTTCCCTAC | | | |
| EasySci- | AATGATACGGCGACCACCGAGATCTACACTTA | 785 | TTATTCTGAG | 1169 |
| RNA_ligation1_17 | TTCTGAGACACTCTTTCCCTAC | | | |
| EasySci- | AATGATACGGCGACCACCGAGATCTACACTTA | 786 | TTATTATGGT | 1170 |
| RNA_ligation1_18 | TTATGGTACACTCTTTCCCTAC | | | |
| EasySci- | AATGATACGGCGACCACCGAGATCTACACATA | 787 | ATATGAGCCA | 1171 |
| RNA_ligation1_19 | TGAGCCAACACTCTTTCCCTAC | | | |
| EasySci- | AATGATACGGCGACCACCGAGATCTACACCAA | 788 | CAACCAGTAC | 1172 |
| RNA_ligation1_20 | CCAGTACACACTCTTTCCCTAC | | | |
| EasySci- | AATGATACGGCGACCACCGAGATCTACACCAT | 789 | CATCCGACTA | 1173 |
| RNA_ligation1_21 | CCGACTAACACTCTTTCCCTAC | | | |
| EasySci- | AATGATACGGCGACCACCGAGATCTACACATC | 790 | ATCATGGCTG | 1174 |
| RNA_ligation1_22 | ATGGCTGACACTCTTTCCCTAC | | | |
| EasySci- | AATGATACGGCGACCACCGAGATCTACACCCG | 791 | CCGCAAGTTC | 1175 |
| RNA_ligation1_23 | CAAGTTCACACTCTTTCCCTAC | | | |
| EasySci- | AATGATACGGCGACCACCGAGATCTACACCTT | 792 | CTTCTCATTG | 1176 |
| RNA_ligation1_24 | CTCATTGACACTCTTTCCCTAC | | | |
| EasySci- | AATGATACGGCGACCACCGAGATCTACACCAG | 793 | CAGGAGGAGA | 1177 |
| RNA_ligation1_25 | GAGGAGAACACTCTTTCCCTAC | | | |
| EasySci- | AATGATACGGCGACCACCGAGATCTACACGAT | 794 | GATATCGGCG | 1178 |
| RNA_ligation1_26 | ATCGGCGACACTCTTTCCCTAC | | | |
| EasySci- | AATGATACGGCGACCACCGAGATCTACACCCA | 795 | CCAGTCCTCT | 1179 |
| RNA_ligation1_27 | GTCCTCTACACTCTTTCCCTAC | | | |
| EasySci- | AATGATACGGCGACCACCGAGATCTACACCAT | 796 | CATAGTTCGG | 1180 |
| RNA_ligation1_28 | AGTTCGGACACTCTTTCCCTAC | | | |
| EasySci- | AATGATACGGCGACCACCGAGATCTACACCGT | 797 | CGTAATGCAG | 1181 |
| RNA_ligation1_29 | AATGCAGACACTCTTTCCCTAC | | | |
| EasySci- | AATGATACGGCGACCACCGAGATCTACACCCG | 798 | CCGTTCGGAT | 1182 |
| RNA_ligation1_30 | TTCGGATACACTCTTTCCCTAC | | | |
| EasySci- | AATGATACGGCGACCACCGAGATCTACACCCA | 799 | CCATAAGTCC | 1183 |
| RNA_ligation1_31 | TAAGTCCACACTCTTTCCCTAC | | | |
| EasySci- | AATGATACGGCGACCACCGAGATCTACACGGC | 800 | GGCAATGAGA | 1184 |
| RNA_ligation1_32 | AATGAGAACACTCTTTCCCTAC | | | |
| EasySci- | AATGATACGGCGACCACCGAGATCTACACCGG | 801 | CGGTTATGCC | 1185 |
| RNA_ligation1_33 | TTATGCCACACTCTTTCCCTAC | | | |
| EasySci- | AATGATACGGCGACCACCGAGATCTACACTGG | 802 | TGGCCGGCCT | 1186 |
| RNA_ligation1_34 | CCGGCCTACACTCTTTCCCTAC | | | |
| EasySci- | AATGATACGGCGACCACCGAGATCTACACAGC | 803 | AGCTGCAATA | 1187 |
| RNA_ligation1_35 | TGCAATAACACTCTTTCCCTAC | | | |
| EasySci- | AATGATACGGCGACCACCGAGATCTACACTGG | 804 | TGGCCATGCA | 1188 |
| RNA_ligation1_36 | CCATGCAACACTCTTTCCCTAC | | | |
| EasySci- | AATGATACGGCGACCACCGAGATCTACACTGA | 805 | TGACGCTCCG | 1189 |
| RNA_ligation1_37 | CGCTCCGACACTCTTTCCCTAC | | | |
| Easy_Sci- | AATGATACGGCGACCACCGAGATCTACACAAC | 806 | AACTGCTGCC | 1190 |
| RNA_ligation1_38 | TGCTGCCACACTCTTTCCCTAC | | | |
| EasySci- | AATGATACGGCGACCACCGAGATCTACACTGC | 807 | TGCGCGATGC | 1191 |
| RNA_ligation1_39 | GCGATGCACACTCTTTCCCTAC | | | |
| EasySci- | AATGATACGGCGACCACCGAGATCTACACATT | 808 | ATTGAGATTG | 1192 |
| RNA_ligation1_40 | GAGATTGACACTCTTTCCCTAC | | | |
| EasySci- | AATGATACGGCGACCACCGAGATCTACACTTG | 809 | TTGATATATT | 1193 |
| RNA_ligation1_41 | ATATATTACACTCTTTCCCTAC | | | |
| EasySci- | AATGATACGGCGACCACCGAGATCTACACCGG | 810 | CGGTAGGAAT | 1194 |
| RNA_ligation1_42 | TAGGAATACACTCTTTCCCTAC | | | |
| EasySci- | AATGATACGGCGACCACCGAGATCTACACACC | 811 | ACCAGCGCAG | 1195 |
| RNA_ligation1_43 | AGCGCAGACACTCTTTCCCTAC | | | |
| EasySci- | AATGATACGGCGACCACCGAGATCTACACCGA | 812 | CGAATGAGCT | 1196 |
| RNA_ligation1_44 | ATGAGCTACACTCTTTCCCTAC | | | |
| EasySci- | AATGATACGGCGACCACCGAGATCTACACAGT | 813 | AGTTCGAGTA | 1197 |
| RNA_ligation1_45 | TCGAGTAACACTCTTTCCCTAC | | | |
| EasySci- | AATGATACGGCGACCACCGAGATCTACACTTG | 814 | TTGGACGCTG | 1198 |
| RNA_ligation1_46 | GACGCTGACACTCTTTCCCTAC | | | |
| EasySci- | AATGATACGGCGACCACCGAGATCTACACATA | 815 | ATAGACTAGG | 1199 |
| RNA_ligation1_47 | GACTAGGACACTCTTTCCCTAC | | | |
| EasySci- | AATGATACGGCGACCACCGAGATCTACACTAT | 816 | TATAGTAAGC | 1200 |
| RNA_ligation1_48 | AGTAAGCACACTCTTTCCCTAC | | | |
| EasySci- | AATGATACGGCGACCACCGAGATCTACACCGG | 817 | CGGTCGTTAA | 1201 |
| RNA_ligation1_49 | TCGTTAAACACTCTTTCCCTAC | | | |
| EasySci- | AATGATACGGCGACCACCGAGATCTACACATG | 818 | ATGGCGGATC | 1202 |
| RNA_ligation1_50 | GCGGATCACACTCTTTCCCTAC | | | |
| EasySci- | AATGATACGGCGACCACCGAGATCTACACCTC | 819 | CTCTGATCAG | 1203 |
| RNA_ligation1_51 | TGATCAGACACTCTTTCCCTAC | | | |
| EasySci- | AATGATACGGCGACCACCGAGATCTACACGGC | 820 | GGCCAGTCCG | 1204 |
| RNA_ligation1_52 | CAGTCCGACACTCTTTCCCTAC | | | |
| EasySci- | AATGATACGGCGACCACCGAGATCTACACCGG | 821 | CGGAAGATAT | 1205 |
| RNA_ligation1_53 | AAGATATACACTCTTTCCCTAC | | | |
| EasySci- | AATGATACGGCGACCACCGAGATCTACACTGG | 822 | TGGCTGATGA | 1206 |
| RNA_ligation1_54 | CTGATGAACACTCTTTCCCTAC | | | |
| EasySci- | AATGATACGGCGACCACCGAGATCTACACGAA | 823 | GAAGGTTGCC | 1207 |
| RNA_ligation1_55 | GGTTGCCACACTCTTTCCCTAC | | | |
| EasySci- | AATGATACGGCGACCACCGAGATCTACACGTT | 824 | GTTGAAGGAT | 1208 |
| RNA_ligation1_56 | GAAGGATACACTCTTTCCCTAC | | | |
| EasySci- | AATGATACGGCGACCACCGAGATCTACACCCA | 825 | CCATTCGTAA | 1209 |
| RNA_ligation1_57 | TTCGTAAACACTCTTTCCCTAC | | | |
| EasySci- | AATGATACGGCGACCACCGAGATCTACACTGC | 826 | TGCGCCAGAA | 1210 |
| RNA_ligation1_58 | GCCAGAAACACTCTTTCCCTAC | | | |
| EasySci- | AATGATACGGCGACCACCGAGATCTACACCGA | 827 | CGAATAATTC | 1211 |
| RNA_ligation1_59 | ATAATTCACACTCTTTCCCTAC | | | |
| EasySci- | AATGATACGGCGACCACCGAGATCTACACGCG | 828 | GCGACGCCTT | 1212 |
| RNA_ligation1_60 | ACGCCTTACACTCTTTCCCTAC | | | |
| EasySci- | AATGATACGGCGACCACCGAGATCTACACATC | 829 | ATCAACGATT | 1213 |
| RNA_ligation1_61 | AACGATTACACTCTTTCCCTAC | | | |
| EasySci- | AATGATACGGCGACCACCGAGATCTACACGTT | 830 | GTTCTGAATT | 1214 |
| RNA_ligation1_62 | CTGAATTACACTCTTTCCCTAC | | | |
| EasySci- | AATGATACGGCGACCACCGAGATCTACACGCT | 831 | GCTAACCTCA | 1215 |
| RNA_ligation1_63 | AACCTCAACACTCTTTCCCTAC | | | |
| EasySci- | AATGATACGGCGACCACCGAGATCTACACCAA | 832 | CAAGCAACTG | 1216 |
| RNA_ligation1_64 | GCAACTGACACTCTTTCCCTAC | | | |
| EasySci- | AATGATACGGCGACCACCGAGATCTACACGGA | 833 | GGAGCGGCCG | 1217 |
| RNA_ligation1_65 | GCGGCCGACACTCTTTCCCTAC | | | |
| EasySci- | AATGATACGGCGACCACCGAGATCTACACCGC | 834 | CGCGTACGAC | 1218 |
| RNA_ligation1_66 | GTACGACACACTCTTTCCCTAC | | | |
| EasySci- | AATGATACGGCGACCACCGAGATCTACACCGA | 835 | CGATGGCGCC | 1219 |
| RNA_ligation1_67 | TGGCGCCACACTCTTTCCCTAC | | | |
| EasySci- | AATGATACGGCGACCACCGAGATCTACACTGG | 836 | TGGTATTCAT | 1220 |
| RNA_ligation1_68 | TATTCATACACTCTTTCCCTAC | | | |
| EasySci- | AATGATACGGCGACCACCGAGATCTACACGAT | 837 | GATAAGGCAA | 1221 |
| RNA_ligation1_69 | AAGGCAAACACTCTTTCCCTAC | | | |
| EasySci- | AATGATACGGCGACCACCGAGATCTACACGCC | 838 | GCCGGTCGAG | 1222 |
| RNA_ligation1_70 | GGTCGAGACACTCTTTCCCTAC | | | |
| EasySci- | AATGATACGGCGACCACCGAGATCTACACTGC | 839 | TGCGCCATCT | 1223 |
| RNA_ligation1_71 | GCCATCTACACTCTTTCCCTAC | | | |
| EasySci- | AATGATACGGCGACCACCGAGATCTACACAAG | 840 | AAGTCTTCCG | 1224 |
| RNA_ligation1_72 | TCTTCCGACACTCTTTCCCTAC | | | |
| Easy_Sci- | AATGATACGGCGACCACCGAGATCTACACAGA | 841 | AGACTCAAGC | 1225 |
| RNA_ligation1_73 | CTCAAGCACACTCTTTCCCTAC | | | |
| EasySci- | AATGATACGGCGACCACCGAGATCTACACGCA | 842 | GCAGGCGACG | 1226 |
| RNA_ligation1_74 | GGCGACGACACTCTTTCCCTAC | | | |
| EasySci- | AATGATACGGCGACCACCGAGATCTACACAAT | 843 | AATACTCTTC | 1227 |
| RNA_ligation1_75 | ACTCTTCACACTCTTTCCCTAC | | | |
| EasySci- | AATGATACGGCGACCACCGAGATCTACACCCA | 844 | CCAACTAACC | 1228 |
| RNA_ligation1_76 | ACTAACCACACTCTTTCCCTAC | | | |
| EasySci- | AATGATACGGCGACCACCGAGATCTACACTAT | 845 | TATCCTCAAT | 1229 |
| RNA_ligation1_77 | CCTCAATACACTCTTTCCCTAC | | | |
| EasySci- | AATGATACGGCGACCACCGAGATCTACACGCC | 846 | GCCGTCGCGT | 1230 |
| RNA_ligation1_78 | GTCGCGTACACTCTTTCCCTAC | | | |
| EasySci- | AATGATACGGCGACCACCGAGATCTACACCCG | 847 | CCGCTGCTTC | 1231 |
| RNA_ligation1_79 | CTGCTTCACACTCTTTCCCTAC | | | |
| EasySci- | AATGATACGGCGACCACCGAGATCTACACTGA | 848 | TGACCGAATC | 1232 |
| RNA_ligation1_80 | CCGAATCACACTCTTTCCCTAC | | | |
| EasySci- | AATGATACGGCGACCACCGAGATCTACACGTC | 849 | GTCTCCAGAG | 1233 |
| RNA_ligation1_81 | TCCAGAGACACTCTTTCCCTAC | | | |
| EasySci- | AATGATACGGCGACCACCGAGATCTACACAAT | 850 | AATGCTAGTC | 1234 |
| RNA_ligation1_82 | GCTAGTCACACTCTTTCCCTAC | | | |
| EasySci- | AATGATACGGCGACCACCGAGATCTACACGAC | 851 | GACGACCTGC | 1235 |
| RNA_ligation1_83 | GACCTGCACACTCTTTCCCTAC | | | |
| EasySci- | AATGATACGGCGACCACCGAGATCTACACAGA | 852 | AGAGCCAGCC | 1236 |
| RNA_ligation1_84 | GCCAGCCACACTCTTTCCCTAC | | | |
| EasySci- | AATGATACGGCGACCACCGAGATCTACACCCA | 853 | CCAGGCCGCA | 1237 |
| RNA_ligation1_85 | GGCCGCAACACTCTTTCCCTAC | | | |
| EasySci- | AATGATACGGCGACCACCGAGATCTACACCAG | 854 | CAGGTATGGA | 1238 |
| RNA_ligation1_86 | GTATGGAACACTCTTTCCCTAC | | | |
| EasySci- | AATGATACGGCGACCACCGAGATCTACACCCG | 855 | CCGGAGTTGC | 1239 |
| RNA_ligation1_87 | GAGTTGCACACTCTTTCCCTAC | | | |
| EasySci- | AATGATACGGCGACCACCGAGATCTACACTTA | 856 | TTAATTATTG | 1240 |
| RNA_ligation1_88 | ATTATTGACACTCTTTCCCTAC | | | |
| EasySci- | AATGATACGGCGACCACCGAGATCTACACAAT | 857 | AATCAGCTGC | 1241 |
| RNA_ligation1_89 | CAGCTGCACACTCTTTCCCTAC | | | |
| EasySci- | AATGATACGGCGACCACCGAGATCTACACCCG | 858 | CCGTTGACTT | 1242 |
| RNA_ligation1_90 | TTGACTTACACTCTTTCCCTAC | | | |
| EasySci- | AATGATACGGCGACCACCGAGATCTACACGCC | 859 | GCCAGGATCA | 1243 |
| RNA_ligation1_91 | AGGATCAACACTCTTTCCCTAC | | | |
| EasySci- | AATGATACGGCGACCACCGAGATCTACACCTT | 860 | CTTCGGCGCA | 1244 |
| RNA_ligation1_92 | CGGCGCAACACTCTTTCCCTAC | | | |
| EasySci- | AATGATACGGCGACCACCGAGATCTACACCAA | 861 | CAAGGCATTC | 1245 |
| RNA_ligation1_93 | GGCATTCACACTCTTTCCCTAC | | | |
| EasySci- | AATGATACGGCGACCACCGAGATCTACACAAG | 862 | AAGAATGGAA | 1246 |
| RNA_ligation1_94 | AATGGAAACACTCTTTCCCTAC | | | |
| EasySci- | AATGATACGGCGACCACCGAGATCTACACCGG | 863 | CGGATGAAGG | 1247 |
| RNA_ligation1_95 | ATGAAGGACACTCTTTCCCTAC | | | |
| EasySci- | AATGATACGGCGACCACCGAGATCTACACTAT | 864 | TATCGTCGGC | 1248 |
| RNA_ligation1_96 | CGTCGGCACACTCTTTCCCTAC | | | |
| EasySci- | AATGATACGGCGACCACCGAGATCTACACAGA | 865 | AGAGAACTTG | 1249 |
| RNA_ligation2_01 | GAACTTGACACTCTTTCCCTAC | | | |
| EasySci- | AATGATACGGCGACCACCGAGATCTACACAGT | 866 | AGTCGGCTCC | 1250 |
| RNA_ligation2_02 | CGGCTCCACACTCTTTCCCTAC | | | |
| EasySci- | AATGATACGGCGACCACCGAGATCTACACTAC | 867 | TACCAGAGTA | 1251 |
| RNA_ligation2_03 | CAGAGTAACACTCTTTCCCTAC | | | |
| EasySci- | AATGATACGGCGACCACCGAGATCTACACACC | 868 | ACCGACCTCA | 1252 |
| RNA_ligation2_04 | GACCTCAACACTCTTTCCCTAC | | | |
| EasySci- | AATGATACGGCGACCACCGAGATCTACACATC | 869 | ATCCTACCTC | 1253 |
| RNA_ligation2_05 | CTACCTCACACTCTTTCCCTAC | | | |
| EasySci- | AATGATACGGCGACCACCGAGATCTACACTGC | 870 | TGCAAGGCGT | 1254 |
| RNA_ligation2_06 | AAGGCGTACACTCTTTCCCTAC | | | |
| EasySci- | AATGATACGGCGACCACCGAGATCTACACTTG | 871 | TTGCTGCGCC | 1255 |
| RNA_ligation2_07 | CTGCGCCACACTCTTTCCCTAC | | | |
| EasySci- | AATGATACGGCGACCACCGAGATCTACACCCG | 872 | CCGCGCTATA | 1256 |
| RNA_ligation2_08 | CGCTATAACACTCTTTCCCTAC | | | |
| EasySci- | AATGATACGGCGACCACCGAGATCTACACGGA | 873 | GGACGGAGCC | 1257 |
| RNA_ligation2_09 | CGGAGCCACACTCTTTCCCTAC | | | |
| EasySci- | AATGATACGGCGACCACCGAGATCTACACAAT | 874 | AATACTTGCG | 1258 |
| RNA_ligation2_10 | ACTTGCGACACTCTTTCCCTAC | | | |
| EasySci- | AATGATACGGCGACCACCGAGATCTACACGGA | 875 | GGATTGACTC | 1259 |
| RNA_ligation2_11 | TTGACTCACACTCTTTCCCTAC | | | |
| EasySci- | AATGATACGGCGACCACCGAGATCTACACAGC | 876 | AGCTTACGAA | 1260 |
| RNA_ligation2_12 | TTACGAAACACTCTTTCCCTAC | | | |
| EasySci- | AATGATACGGCGACCACCGAGATCTACACTGA | 877 | TGATGCATCG | 1261 |
| RNA_ligation2_13 | TGCATCGACACTCTTTCCCTAC | | | |
| EasySci- | AATGATACGGCGACCACCGAGATCTACACATA | 878 | ATAATCTCGC | 1262 |
| RNA_ligation2_14 | ATCTCGCACACTCTTTCCCTAC | | | |
| EasySci- | AATGATACGGCGACCACCGAGATCTACACCAG | 879 | CAGCAGTATC | 1263 |
| RNA_ligation2_15 | CAGTATCACACTCTTTCCCTAC | | | |
| EasySci- | AATGATACGGCGACCACCGAGATCTACACACG | 880 | ACGACCAATA | 1264 |
| RNA_ligation2_16 | ACCAATAACACTCTTTCCCTAC | | | |
| EasySci- | AATGATACGGCGACCACCGAGATCTACACCGG | 881 | CGGATAGGTA | 1265 |
| RNA_ligation2_17 | ATAGGTAACACTCTTTCCCTAC | | | |
| EasySci- | AATGATACGGCGACCACCGAGATCTACACTCG | 882 | TCGAAGCGCG | 1266 |
| RNA_ligation2_18 | AAGCGCGACACTCTTTCCCTAC | | | |
| EasySci- | AATGATACGGCGACCACCGAGATCTACACGGT | 883 | GGTAAGCTCT | 1267 |
| RNA_ligation2_19 | AAGCTCTACACTCTTTCCCTAC | | | |
| EasySci- | AATGATACGGCGACCACCGAGATCTACACAGG | 884 | AGGTAATTCC | 1268 |
| RNA_ligation2_20 | TAATTCCACACTCTTTCCCTAC | | | |
| EasySci- | AATGATACGGCGACCACCGAGATCTACACAGA | 885 | AGACCATTCA | 1269 |
| RNA_ligation2_21 | CCATTCAACACTCTTTCCCTAC | | | |
| EasySci- | AATGATACGGCGACCACCGAGATCTACACCTG | 886 | CTGATCGACC | 1270 |
| RNA_ligation2_22 | ATCGACCACACTCTTTCCCTAC | | | |
| EasySci- | AATGATACGGCGACCACCGAGATCTACACGCA | 887 | GCAATTACTC | 1271 |
| RNA_ligation2_23 | ATTACTCACACTCTTTCCCTAC | | | |
| EasySci- | AATGATACGGCGACCACCGAGATCTACACGAG | 888 | GAGGAGTTCG | 1272 |
| RNA_ligation2_24 | GAGTTCGACACTCTTTCCCTAC | | | |
| EasySci- | AATGATACGGCGACCACCGAGATCTACACTAG | 889 | TAGTACTATC | 1273 |
| RNA_ligation2_25 | TACTATCACACTCTTTCCCTAC | | | |
| EasySci- | AATGATACGGCGACCACCGAGATCTACACCGA | 890 | CGACTTGGCG | 1274 |
| RNA_ligation2_26 | CTTGGCGACACTCTTTCCCTAC | | | |
| EasySci- | AATGATACGGCGACCACCGAGATCTACACCTA | 891 | CTATTCGGCC | 1275 |
| RNA_ligation2_27 | TTCGGCCACACTCTTTCCCTAC | | | |
| EasySci- | AATGATACGGCGACCACCGAGATCTACACCTT | 892 | CTTCCAAGAA | 1276 |
| RNA_ligation2_28 | CCAAGAAACACTCTTTCCCTAC | | | |
| EasySci- | AATGATACGGCGACCACCGAGATCTACACCGA | 893 | CGATCCTGGA | 1277 |
| RNA_ligation2_29 | TCCTGGAACACTCTTTCCCTAC | | | |
| EasySci- | AATGATACGGCGACCACCGAGATCTACACTAT | 894 | TATTCCGTTA | 1278 |
| RNA_ligation2_30 | TCCGTTAACACTCTTTCCCTAC | | | |
| EasySci- | AATGATACGGCGACCACCGAGATCTACACTTA | 895 | TTAGTACGCC | 1279 |
| RNA_ligation2_31 | GTACGCCACACTCTTTCCCTAC | | | |
| EasySci- | AATGATACGGCGACCACCGAGATCTACACTCG | 896 | TCGTAGCATC | 1280 |
| RNA_ligation2_32 | TAGCATCACACTCTTTCCCTAC | | | |
| EasySci- | AATGATACGGCGACCACCGAGATCTACACGTA | 897 | GTATTAAGTT | 1281 |
| RNA_ligation2_33 | TTAAGTTACACTCTTTCCCTAC | | | |
| EasySci- | AATGATACGGCGACCACCGAGATCTACACCAT | 898 | CATTCTAGAA | 1282 |
| RNA_ligation2_34 | TCTAGAAACACTCTTTCCCTAC | | | |
| EasySci- | AATGATACGGCGACCACCGAGATCTACACGGT | 899 | GGTAGATCAA | 1283 |
| RNA_ligation2_35 | AGATCAAACACTCTTTCCCTAC | | | |
| EasySci- | AATGATACGGCGACCACCGAGATCTACACATC | 900 | ATCTCCTACG | 1284 |
| RNA_ligation2_36 | TCCTACGACACTCTTTCCCTAC | | | |
| EasySci- | AATGATACGGCGACCACCGAGATCTACACACG | 901 | ACGAAGAAGC | 1285 |
| RNA_ligation2_37 | AAGAAGCACACTCTTTCCCTAC | | | |
| EasySci- | AATGATACGGCGACCACCGAGATCTACACCCG | 902 | CCGATCAGCC | 1286 |
| RNA_ligation2_38 | ATCAGCCACACTCTTTCCCTAC | | | |
| EasySci- | AATGATACGGCGACCACCGAGATCTACACCTG | 903 | CTGGCTTCCT | 1287 |
| RNA_ligation2_39 | GCTTCCTACACTCTTTCCCTAC | | | |
| EasySci- | AATGATACGGCGACCACCGAGATCTACACTTC | 904 | TTCATAATGG | 1288 |
| RNA_ligation2_40 | ATAATGGACACTCTTTCCCTAC | | | |
| EasySci- | AATGATACGGCGACCACCGAGATCTACACGTT | 905 | GTTGAACGCA | 1289 |
| RNA_ligation2_41 | GAACGCAACACTCTTTCCCTAC | | | |
| EasySci- | AATGATACGGCGACCACCGAGATCTACACTAA | 906 | TAACGGCTGA | 1290 |
| RNA_ligation2_42 | CGGCTGAACACTCTTTCCCTAC | | | |
| EasySci- | AATGATACGGCGACCACCGAGATCTACACGAA | 907 | GAAGTCCGTC | 1291 |
| RNA_ligation2_43 | GTCCGTCACACTCTTTCCCTAC | | | |
| EasySci- | AATGATACGGCGACCACCGAGATCTACACATA | 908 | ATACGCCGCC | 1292 |
| RNA_ligation2_44 | CGCCGCCACACTCTTTCCCTAC | | | |
| EasySci- | AATGATACGGCGACCACCGAGATCTACACACT | 909 | ACTGGATGCT | 1293 |
| RNA_ligation2_45 | GGATGCTACACTCTTTCCCTAC | | | |
| EasySci- | AATGATACGGCGACCACCGAGATCTACACGAG | 910 | GAGCGAATAT | 1294 |
| RNA_ligation2_46 | CGAATATACACTCTTTCCCTAC | | | |
| EasySci- | AATGATACGGCGACCACCGAGATCTACACTAT | 911 | TATATGAAGT | 1295 |
| RNA_ligation2_47 | ATGAAGTACACTCTTTCCCTAC | | | |
| EasySci- | AATGATACGGCGACCACCGAGATCTACACACG | 912 | ACGATACCGG | 1296 |
| RNA_ligation2_48 | ATACCGGACACTCTTTCCCTAC | | | |
| EasySci- | AATGATACGGCGACCACCGAGATCTACACTCA | 913 | TCATACCGCT | 1297 |
| RNA_ligation2_49 | TACCGCTACACTCTTTCCCTAC | | | |
| EasySci- | AATGATACGGCGACCACCGAGATCTACACCGC | 914 | CGCTAACCGT | 1298 |
| RNA_ligation2_50 | TAACCGTACACTCTTTCCCTAC | | | |
| EasySci- | AATGATACGGCGACCACCGAGATCTACACCGC | 915 | CGCATCCATC | 1299 |
| RNA_ligation2_51 | ATCCATCACACTCTTTCCCTAC | | | |
| EasySci- | AATGATACGGCGACCACCGAGATCTACACCGT | 916 | CGTCTTCCTT | 1300 |
| RNA_ligation2_52 | CTTCCTTACACTCTTTCCCTAC | | | |
| EasySci- | AATGATACGGCGACCACCGAGATCTACACAAC | 917 | AACGCTATTA | 1301 |
| RNA_ligation2_53 | GCTATTAACACTCTTTCCCTAC | | | |
| EasySci- | AATGATACGGCGACCACCGAGATCTACACTAA | 918 | TAAGATAGGT | 1302 |
| RNA_ligation2_54 | GATAGGTACACTCTTTCCCTAC | | | |
| EasySci- | AATGATACGGCGACCACCGAGATCTACACTGA | 919 | TGATAATAGC | 1303 |
| RNA_ligation2_55 | TAATAGCACACTCTTTCCCTAC | | | |
| EasySci- | AATGATACGGCGACCACCGAGATCTACACGGC | 920 | GGCCTCCATT | 1304 |
| RNA_ligation2_56 | CTCCATTACACTCTTTCCCTAC | | | |
| EasySci- | AATGATACGGCGACCACCGAGATCTACACTGC | 921 | TGCCGCCGAT | 1305 |
| RNA_ligation2_57 | CGCCGATACACTCTTTCCCTAC | | | |
| EasySci- | AATGATACGGCGACCACCGAGATCTACACTGC | 922 | TGCCTATTAT | 1306 |
| RNA_ligation2_58 | CTATTATACACTCTTTCCCTAC | | | |
| EasySci- | AATGATACGGCGACCACCGAGATCTACACCTG | 923 | CTGATACGTC | 1307 |
| RNA_ligation2_59 | ATACGTCACACTCTTTCCCTAC | | | |
| EasySci- | AATGATACGGCGACCACCGAGATCTACACGAC | 924 | GACCTGGAAT | 1308 |
| RNA_ligation2_60 | CTGGAATACACTCTTTCCCTAC | | | |
| EasySci- | AATGATACGGCGACCACCGAGATCTACACTCA | 925 | TCAGATCGGA | 1309 |
| RNA_ligation2_61 | GATCGGAACACTCTTTCCCTAC | | | |
| EasySci- | AATGATACGGCGACCACCGAGATCTACACGAG | 926 | GAGGCGGAAT | 1310 |
| RNA_ligation2_62 | GCGGAATACACTCTTTCCCTAC | | | |
| EasySci- | AATGATACGGCGACCACCGAGATCTACACCAG | 927 | CAGCGCATCC | 1311 |
| RNA_ligation2_63 | CGCATCCACACTCTTTCCCTAC | | | |
| EasySci- | AATGATACGGCGACCACCGAGATCTACACAAT | 928 | AATGCCAAGA | 1312 |
| RNA_ligation2_64 | GCCAAGAACACTCTTTCCCTAC | | | |
| EasySci- | AATGATACGGCGACCACCGAGATCTACACTGG | 929 | TGGTCTACGT | 1313 |
| RNA_ligation2_65 | TCTACGTACACTCTTTCCCTAC | | | |
| EasySci- | AATGATACGGCGACCACCGAGATCTACACGGT | 930 | GGTCGCCGCT | 1314 |
| RNA_ligation2_66 | CGCCGCTACACTCTTTCCCTAC | | | |
| EasySci- | AATGATACGGCGACCACCGAGATCTACACAGC | 931 | AGCAAGTAGT | 1315 |
| RNA_ligation2_67 | AAGTAGTACACTCTTTCCCTAC | | | |
| EasySci- | AATGATACGGCGACCACCGAGATCTACACAAG | 932 | AAGAAGTTCA | 1316 |
| RNA_ligation2_68 | AAGTTCAACACTCTTTCCCTAC | | | |
| EasySci- | AATGATACGGCGACCACCGAGATCTACACCGG | 933 | CGGCGCTGGC | 1317 |
| RNA_ligation2_69 | CGCTGGCACACTCTTTCCCTAC | | | |
| EasySci- | AATGATACGGCGACCACCGAGATCTACACTCG | 934 | TCGTCAACTT | 1318 |
| RNA_ligation2_70 | TCAACTTACACTCTTTCCCTAC | | | |
| EasySci- | AATGATACGGCGACCACCGAGATCTACACCAA | 935 | CAACTTGGAT | 1319 |
| RNA_ligation2_71 | CTTGGATACACTCTTTCCCTAC | | | |
| EasySci- | AATGATACGGCGACCACCGAGATCTACACTTG | 936 | TTGGAGCTCA | 1320 |
| RNA_ligation2_72 | GAGCTCAACACTCTTTCCCTAC | | | |
| EasySci- | AATGATACGGCGACCACCGAGATCTACACCTT | 937 | CTTAGTTCAA | 1321 |
| RNA_ligation2_73 | AGTTCAAACACTCTTTCCCTAC | | | |
| EasySci- | AATGATACGGCGACCACCGAGATCTACACTTG | 938 | TTGAATTATA | 1322 |
| RNA_ligation2_74 | AATTATAACACTCTTTCCCTAC | | | |
| EasySci- | AATGATACGGCGACCACCGAGATCTACACCTT | 939 | CTTCAGCTTC | 1323 |
| RNA_ligation2_75 | CAGCTTCACACTCTTTCCCTAC | | | |
| EasySci- | AATGATACGGCGACCACCGAGATCTACACGTA | 940 | GTATACCGAA | 1324 |
| RNA_ligation2_76 | TACCGAAACACTCTTTCCCTAC | | | |
| EasySci- | AATGATACGGCGACCACCGAGATCTACACGGA | 941 | GGATATAATA | 1325 |
| RNA_ligation2_77 | TATAATAACACTCTTTCCCTAC | | | |
| EasySci- | AATGATACGGCGACCACCGAGATCTACACGAA | 942 | GAATCGACGT | 1326 |
| RNA_ligation2_78 | TCGACGTACACTCTTTCCCTAC | | | |
| EasySci- | AATGATACGGCGACCACCGAGATCTACACTGA | 943 | TGAACGGTAA | 1327 |
| RNA_ligation2_79 | ACGGTAAACACTCTTTCCCTAC | | | |
| EasySci- | AATGATACGGCGACCACCGAGATCTACACAAG | 944 | AAGTCGCGCG | 1328 |
| RNA_ligation2_80 | TCGCGCGACACTCTTTCCCTAC | | | |
| EasySci- | AATGATACGGCGACCACCGAGATCTACACTCC | 945 | TCCGCCTACT | 1329 |
| RNA_ligation2_81 | GCCTACTACACTCTTTCCCTAC | | | |
| Easy_Sci- | AATGATACGGCGACCACCGAGATCTACACTTA | 946 | TTAATAGTTC | 1330 |
| RNA_ligation2_82 | ATAGTTCACACTCTTTCCCTAC | | | |
| EasySci- | AATGATACGGCGACCACCGAGATCTACACCAA | 947 | CAACCGGATC | 1331 |
| RNA_ligation2_83 | CCGGATCACACTCTTTCCCTAC | | | |
| EasySci- | AATGATACGGCGACCACCGAGATCTACACTTA | 948 | TTAGAGCAAC | 1332 |
| RNA_ligation2_84 | GAGCAACACACTCTTTCCCTAC | | | |
| EasySci- | AATGATACGGCGACCACCGAGATCTACACCGT | 949 | CGTCATTCCA | 1333 |
| RNA_ligation2_85 | CATTCCAACACTCTTTCCCTAC | | | |
| EasySci- | AATGATACGGCGACCACCGAGATCTACACTAG | 950 | TAGGAAGGCA | 1334 |
| RNA_ligation2_86 | GAAGGCAACACTCTTTCCCTAC | | | |
| EasySci- | AATGATACGGCGACCACCGAGATCTACACTTG | 951 | TTGGCCTATA | 1335 |
| RNA_ligation2_87 | GCCTATAACACTCTTTCCCTAC | | | |
| EasySci- | AATGATACGGCGACCACCGAGATCTACACGCG | 952 | GCGTCTATTC | 1336 |
| RNA_ligation2_88 | TCTATTCACACTCTTTCCCTAC | | | |
| EasySci- | AATGATACGGCGACCACCGAGATCTACACCAG | 953 | CAGAGTAGAC | 1337 |
| RNA_ligation2_89 | AGTAGACACACTCTTTCCCTAC | | | |
| EasySci- | AATGATACGGCGACCACCGAGATCTACACATG | 954 | ATGCCGGACG | 1338 |
| RNA_ligation2_90 | CCGGACGACACTCTTTCCCTAC | | | |
| EasySci- | AATGATACGGCGACCACCGAGATCTACACTAT | 955 | TATTCGATCT | 1339 |
| RNA_ligation2_91 | TCGATCTACACTCTTTCCCTAC | | | |
| EasySci- | AATGATACGGCGACCACCGAGATCTACACATG | 956 | ATGGATCCGA | 1340 |
| RNA_ligation2_92 | GATCCGAACACTCTTTCCCTAC | | | |
| EasySci- | AATGATACGGCGACCACCGAGATCTACACATA | 957 | ATAATGCATT | 1341 |
| RNA_ligation2_93 | ATGCATTACACTCTTTCCCTAC | | | |
| EasySci- | AATGATACGGCGACCACCGAGATCTACACAAG | 958 | AAGTAGACTA | 1342 |
| RNA_ligation2_94 | TAGACTAACACTCTTTCCCTAC | | | |
| EasySci- | AATGATACGGCGACCACCGAGATCTACACATG | 959 | ATGGAAGCAT | 1343 |
| RNA_ligation2_95 | GAAGCATACACTCTTTCCCTAC | | | |
| EasySci- | AATGATACGGCGACCACCGAGATCTACACTGG | 960 | TGGATCAGGC | 1344 |
| RNA_ligation2_96 | ATCAGGCACACTCTTTCCCTAC | | | |
| EasySci- | AATGATACGGCGACCACCGAGATCTACACGTT | 961 | GTTACTTAGC | 1345 |
| RNA_ligation3_01 | ACTTAGCACACTCTTTCCCTAC | | | |
| EasySci- | AATGATACGGCGACCACCGAGATCTACACACC | 962 | ACCGCCGCAA | 1346 |
| RNA_ligation3_02 | GCCGCAAACACTCTTTCCCTAC | | | |
| EasySci- | AATGATACGGCGACCACCGAGATCTACACCTC | 963 | CTCAAGTCCT | 1347 |
| RNA_ligation3_03 | AAGTCCTACACTCTTTCCCTAC | | | |
| EasySci- | AATGATACGGCGACCACCGAGATCTACACCGG | 964 | CGGTCGACTA | 1348 |
| RNA_ligation3_04 | TCGACTAACACTCTTTCCCTAC | | | |
| EasySci- | AATGATACGGCGACCACCGAGATCTACACTTC | 965 | TTCGCCGTAA | 1349 |
| RNA_ligation3_05 | GCCGTAAACACTCTTTCCCTAC | | | |
| EasySci- | AATGATACGGCGACCACCGAGATCTACACGCT | 966 | GCTCCGCTTG | 1350 |
| RNA_ligation3_06 | CCGCTTGACACTCTTTCCCTAC | | | |
| EasySci- | AATGATACGGCGACCACCGAGATCTACACACT | 967 | ACTTAAGATA | 1351 |
| RNA_ligation3_07 | TAAGATAACACTCTTTCCCTAC | | | |
| EasySci- | AATGATACGGCGACCACCGAGATCTACACGGC | 968 | GGCATGGCCA | 1352 |
| RNA_ligation3_08 | ATGGCCAACACTCTTTCCCTAC | | | |
| EasySci- | AATGATACGGCGACCACCGAGATCTACACCTT | 969 | CTTCGGTATA | 1353 |
| RNA_ligation3_09 | CGGTATAACACTCTTTCCCTAC | | | |
| EasySci- | AATGATACGGCGACCACCGAGATCTACACGAG | 970 | GAGATTCGCC | 1354 |
| RNA_ligation3_10 | ATTCGCCACACTCTTTCCCTAC | | | |
| EasySci- | AATGATACGGCGACCACCGAGATCTACACCTA | 971 | CTAGGCCGTT | 1355 |
| RNA_ligation3_11 | GGCCGTTACACTCTTTCCCTAC | | | |
| EasySci- | AATGATACGGCGACCACCGAGATCTACACGGC | 972 | GGCCAACGAT | 1356 |
| RNA_ligation3_12 | CAACGATACACTCTTTCCCTAC | | | |
| EasySci- | AATGATACGGCGACCACCGAGATCTACACACG | 973 | ACGGAACCTG | 1357 |
| RNA_ligation3_13 | GAACCTGACACTCTTTCCCTAC | | | |
| EasySci- | AATGATACGGCGACCACCGAGATCTACACTGA | 974 | TGATTCTCGT | 1358 |
| RNA_ligation3_14 | TTCTCGTACACTCTTTCCCTAC | | | |
| EasySci- | AATGATACGGCGACCACCGAGATCTACACTTG | 975 | TTGCGTCAAC | 1359 |
| RNA_ligation3_15 | CGTCAACACACTCTTTCCCTAC | | | |
| EasySci- | AATGATACGGCGACCACCGAGATCTACACGAA | 976 | GAATGCAACC | 1360 |
| RNA_ligation3_16 | TGCAACCACACTCTTTCCCTAC | | | |
| EasySci- | AATGATACGGCGACCACCGAGATCTACACTGC | 977 | TGCGGTTCAG | 1361 |
| RNA_ligation3_17 | GGTTCAGACACTCTTTCCCTAC | | | |
| EasySci- | AATGATACGGCGACCACCGAGATCTACACTTG | 978 | TTGGCCAACC | 1362 |
| RNA_ligation3_18 | GCCAACCACACTCTTTCCCTAC | | | |
| EasySci- | AATGATACGGCGACCACCGAGATCTACACTTG | 979 | TTGGTTAAGC | 1363 |
| RNA_ligation3_19 | GTTAAGCACACTCTTTCCCTAC | | | |
| EasySci- | AATGATACGGCGACCACCGAGATCTACACCTT | 980 | CTTAAGTTCG | 1364 |
| RNA_ligation3_20 | AAGTTCGACACTCTTTCCCTAC | | | |
| Easy_Sci- | AATGATACGGCGACCACCGAGATCTACACGTC | 981 | GTCCTCAGAA | 1365 |
| RNA_ligation3_21 | CTCAGAAACACTCTTTCCCTAC | | | |
| EasySci- | AATGATACGGCGACCACCGAGATCTACACGGA | 982 | GGAGTCGTCT | 1366 |
| RNA_ligation3_22 | GTCGTCTACACTCTTTCCCTAC | | | |
| EasySci- | AATGATACGGCGACCACCGAGATCTACACGGT | 983 | GGTACCTCTA | 1367 |
| RNA_ligation3_23 | ACCTCTAACACTCTTTCCCTAC | | | |
| EasySci- | AATGATACGGCGACCACCGAGATCTACACGAT | 984 | GATCGCTGAG | 1368 |
| RNA_ligation3_24 | CGCTGAGACACTCTTTCCCTAC | | | |
| EasySci- | AATGATACGGCGACCACCGAGATCTACACAGA | 985 | AGAGTACTCC | 1369 |
| RNA_ligation3_25 | GTACTCCACACTCTTTCCCTAC | | | |
| EasySci- | AATGATACGGCGACCACCGAGATCTACACTCA | 986 | TCATTCTATT | 1370 |
| RNA_ligation3_26 | TTCTATTACACTCTTTCCCTAC | | | |
| EasySci- | AATGATACGGCGACCACCGAGATCTACACGTT | 987 | GTTACTACCA | 1371 |
| RNA_ligation3_27 | ACTACCAACACTCTTTCCCTAC | | | |
| EasySci- | AATGATACGGCGACCACCGAGATCTACACCCA | 988 | CCAGCTCGCC | 1372 |
| RNA_ligation3_28 | GCTCGCCACACTCTTTCCCTAC | | | |
| EasySci- | AATGATACGGCGACCACCGAGATCTACACCGC | 989 | CGCCGGTATG | 1373 |
| RNA_ligation3_29 | CGGTATGACACTCTTTCCCTAC | | | |
| EasySci- | AATGATACGGCGACCACCGAGATCTACACTTA | 990 | TTAATTCGTA | 1374 |
| RNA_ligation3_30 | ATTCGTAACACTCTTTCCCTAC | | | |
| EasySci- | AATGATACGGCGACCACCGAGATCTACACGAA | 991 | GAAGGCTCCA | 1375 |
| RNA_ligation3_31 | GGCTCCAACACTCTTTCCCTAC | | | |
| EasySci- | AATGATACGGCGACCACCGAGATCTACACGAG | 992 | GAGACGTACG | 1376 |
| RNA_ligation3_32 | ACGTACGACACTCTTTCCCTAC | | | |
| EasySci- | AATGATACGGCGACCACCGAGATCTACACGAA | 993 | GAAGAGCCTC | 1377 |
| RNA_ligation3_33 | GAGCCTCACACTCTTTCCCTAC | | | |
| EasySci- | AATGATACGGCGACCACCGAGATCTACACCCG | 994 | CCGATGCATA | 1378 |
| RNA_ligation3_34 | ATGCATAACACTCTTTCCCTAC | | | |
| EasySci- | AATGATACGGCGACCACCGAGATCTACACGTA | 995 | GTAATGGTAT | 1379 |
| RNA_ligation3_35 | ATGGTATACACTCTTTCCCTAC | | | |
| EasySci- | AATGATACGGCGACCACCGAGATCTACACTTC | 996 | TTCTATCTCA | 1380 |
| RNA_ligation3_36 | TATCTCAACACTCTTTCCCTAC | | | |
| EasySci- | AATGATACGGCGACCACCGAGATCTACACGCA | 997 | GCAGCAGCTA | 1381 |
| RNA_ligation3_37 | GCAGCTAACACTCTTTCCCTAC | | | |
| EasySci- | AATGATACGGCGACCACCGAGATCTACACTTG | 998 | TTGCTCGATT | 1382 |
| RNA_ligation3_38 | CTCGATTACACTCTTTCCCTAC | | | |
| EasySci- | AATGATACGGCGACCACCGAGATCTACACCCT | 999 | CCTCATCGGC | 1383 |
| RNA_ligation3_39 | CATCGGCACACTCTTTCCCTAC | | | |
| EasySci- | AATGATACGGCGACCACCGAGATCTACACACT | 1000 | ACTTCAGCAA | 1384 |
| RNA_ligation3_40 | TCAGCAAACACTCTTTCCCTAC | | | |
| EasySci- | AATGATACGGCGACCACCGAGATCTACACAGG | 1001 | AGGTCATCCT | 1385 |
| RNA_ligation3_41 | TCATCCTACACTCTTTCCCTAC | | | |
| EasySci- | AATGATACGGCGACCACCGAGATCTACACAAC | 1002 | AACGCGTCAG | 1386 |
| RNA_ligation3_42 | GCGTCAGACACTCTTTCCCTAC | | | |
| EasySci- | AATGATACGGCGACCACCGAGATCTACACCTA | 1003 | CTATGCTTAC | 1387 |
| RNA_ligation3_43 | TGCTTACACACTCTTTCCCTAC | | | |
| EasySci- | AATGATACGGCGACCACCGAGATCTACACGTT | 1004 | GTTGCCGTTC | 1388 |
| RNA_ligation3_44 | GCCGTTCACACTCTTTCCCTAC | | | |
| EasySci- | AATGATACGGCGACCACCGAGATCTACACGCT | 1005 | GCTTACCGCC | 1389 |
| RNA_ligation3_45 | TACCGCCACACTCTTTCCCTAC | | | |
| EasySci- | AATGATACGGCGACCACCGAGATCTACACTGG | 1006 | TGGCAAGTCA | 1390 |
| RNA_ligation3_46 | CAAGTCAACACTCTTTCCCTAC | | | |
| EasySci- | AATGATACGGCGACCACCGAGATCTACACCAT | 1007 | CATCGAAGGA | 1391 |
| RNA_ligation3_47 | CGAAGGAACACTCTTTCCCTAC | | | |
| EasySci- | AATGATACGGCGACCACCGAGATCTACACAGA | 1008 | AGAATCCTCG | 1392 |
| RNA_ligation3_48 | ATCCTCGACACTCTTTCCCTAC | | | |
| EasySci- | AATGATACGGCGACCACCGAGATCTACACGCA | 1009 | GCAATCGGTT | 1393 |
| RNA_ligation3_49 | ATCGGTTACACTCTTTCCCTAC | | | |
| EasySci- | AATGATACGGCGACCACCGAGATCTACACCCT | 1010 | CCTAAGATTC | 1394 |
| RNA_ligation3_50 | AAGATTCACACTCTTTCCCTAC | | | |
| EasySci- | AATGATACGGCGACCACCGAGATCTACACCCT | 1011 | CCTGCGCGCG | 1395 |
| RNA_ligation3_51 | GCGCGCGACACTCTTTCCCTAC | | | |
| EasySci- | AATGATACGGCGACCACCGAGATCTACACATC | 1012 | ATCAGCGCGA | 1396 |
| RNA_ligation3_52 | AGCGCGAACACTCTTTCCCTAC | | | |
| EasySci- | AATGATACGGCGACCACCGAGATCTACACGTA | 1013 | GTACGATTCT | 1397 |
| RNA_ligation3_53 | CGATTCTACACTCTTTCCCTAC | | | |
| EasySci- | AATGATACGGCGACCACCGAGATCTACACTTA | 1014 | TTACCTTGCA | 1398 |
| RNA_ligation3_54 | CCTTGCAACACTCTTTCCCTAC | | | |
| EasySci- | AATGATACGGCGACCACCGAGATCTACACCCG | 1015 | CCGGCTCAGC | 1399 |
| RNA_ligation3_55 | GCTCAGCACACTCTTTCCCTAC | | | |
| Easy_Sci- | AATGATACGGCGACCACCGAGATCTACACTTC | 1016 | TTCTGCAAGA | 1400 |
| RNA_ligation3_56 | TGCAAGAACACTCTTTCCCTAC | | | |
| EasySci- | AATGATACGGCGACCACCGAGATCTACACATA | 1017 | ATATACGCTT | 1401 |
| RNA_ligation3_57 | TACGCTTACACTCTTTCCCTAC | | | |
| EasySci- | AATGATACGGCGACCACCGAGATCTACACCTC | 1018 | CTCAGCAACC | 1402 |
| RNA_ligation3_58 | AGCAACCACACTCTTTCCCTAC | | | |
| EasySci- | AATGATACGGCGACCACCGAGATCTACACCAA | 1019 | CAATTCTAGG | 1403 |
| RNA_ligation3_59 | TTCTAGGACACTCTTTCCCTAC | | | |
| EasySci- | AATGATACGGCGACCACCGAGATCTACACATC | 1020 | ATCAGTCTCG | 1404 |
| RNA_ligation3_60 | AGTCTCGACACTCTTTCCCTAC | | | |
| EasySci- | AATGATACGGCGACCACCGAGATCTACACAAT | 1021 | AATCCGCAAC | 1405 |
| RNA_ligation3_61 | CCGCAACACACTCTTTCCCTAC | | | |
| EasySci- | AATGATACGGCGACCACCGAGATCTACACCGG | 1022 | CGGTTACCTT | 1406 |
| RNA_ligation3_62 | TTACCTTACACTCTTTCCCTAC | | | |
| EasySci- | AATGATACGGCGACCACCGAGATCTACACACG | 1023 | ACGTTAAGAC | 1407 |
| RNA_ligation3_63 | TTAAGACACACTCTTTCCCTAC | | | |
| EasySci- | AATGATACGGCGACCACCGAGATCTACACCTA | 1024 | CTATCCAACC | 1408 |
| RNA_ligation3_64 | TCCAACCACACTCTTTCCCTAC | | | |
| EasySci- | AATGATACGGCGACCACCGAGATCTACACATA | 1025 | ATAAGCGAAT | 1409 |
| RNA_ligation3_65 | AGCGAATACACTCTTTCCCTAC | | | |
| EasySci- | AATGATACGGCGACCACCGAGATCTACACCTT | 1026 | CTTATATCGG | 1410 |
| RNA_ligation3_66 | ATATCGGACACTCTTTCCCTAC | | | |
| EasySci- | AATGATACGGCGACCACCGAGATCTACACATA | 1027 | ATATGACGAC | 1411 |
| RNA_ligation3_67 | TGACGACACACTCTTTCCCTAC | | | |
| EasySci- | AATGATACGGCGACCACCGAGATCTACACTTA | 1028 | TTACCGCATA | 1412 |
| RNA_ligation3_68 | CCGCATAACACTCTTTCCCTAC | | | |
| EasySci- | AATGATACGGCGACCACCGAGATCTACACATT | 1029 | ATTCATCGCC | 1413 |
| RNA_ligation3_69 | CATCGCCACACTCTTTCCCTAC | | | |
| EasySci- | AATGATACGGCGACCACCGAGATCTACACAGA | 1030 | AGAAGCAGAA | 1414 |
| RNA_ligation3_70 | AGCAGAAACACTCTTTCCCTAC | | | |
| EasySci- | AATGATACGGCGACCACCGAGATCTACACGTT | 1031 | GTTCGTCGTT | 1415 |
| RNA_ligation3_71 | CGTCGTTACACTCTTTCCCTAC | | | |
| EasySci- | AATGATACGGCGACCACCGAGATCTACACCAT | 1032 | CATGCTTCCA | 1416 |
| RNA_ligation3_72 | GCTTCCAACACTCTTTCCCTAC | | | |
| EasySci- | AATGATACGGCGACCACCGAGATCTACACTCG | 1033 | TCGGTACCAG | 1417 |
| RNA_ligation3_73 | GTACCAGACACTCTTTCCCTAC | | | |
| EasySci- | AATGATACGGCGACCACCGAGATCTACACTTG | 1034 | TTGAGCCAAT | 1418 |
| RNA_ligation3_74 | AGCCAATACACTCTTTCCCTAC | | | |
| EasySci- | AATGATACGGCGACCACCGAGATCTACACAGA | 1035 | AGATGACTGA | 1419 |
| RNA_ligation3_75 | TGACTGAACACTCTTTCCCTAC | | | |
| EasySci- | AATGATACGGCGACCACCGAGATCTACACACG | 1036 | ACGCTAGAAG | 1420 |
| RNA_ligation3_76 | CTAGAAGACACTCTTTCCCTAC | | | |
| EasySci- | AATGATACGGCGACCACCGAGATCTACACGTT | 1037 | GTTCAATTGC | 1421 |
| RNA_ligation3_77 | CAATTGCACACTCTTTCCCTAC | | | |
| EasySci- | AATGATACGGCGACCACCGAGATCTACACGGA | 1038 | GGACCGTCAA | 1422 |
| RNA_ligation3_78 | CCGTCAAACACTCTTTCCCTAC | | | |
| EasySci- | AATGATACGGCGACCACCGAGATCTACACCAT | 1039 | CATTAACGGA | 1423 |
| RNA_ligation3_79 | TAACGGAACACTCTTTCCCTAC | | | |
| EasySci- | AATGATACGGCGACCACCGAGATCTACACTAA | 1040 | TAAGCAGTCC | 1424 |
| RNA_ligation3_80 | GCAGTCCACACTCTTTCCCTAC | | | |
| EasySci- | AATGATACGGCGACCACCGAGATCTACACCCG | 1041 | CCGGTCAGTT | 1425 |
| RNA_ligation3_81 | GTCAGTTACACTCTTTCCCTAC | | | |
| EasySci- | AATGATACGGCGACCACCGAGATCTACACATA | 1042 | ATAACGGACT | 1426 |
| RNA_ligation3_82 | ACGGACTACACTCTTTCCCTAC | | | |
| EasySci- | AATGATACGGCGACCACCGAGATCTACACACG | 1043 | ACGAGAAGAT | 1427 |
| RNA_ligation3_83 | AGAAGATACACTCTTTCCCTAC | | | |
| EasySci- | AATGATACGGCGACCACCGAGATCTACACATC | 1044 | ATCCTCTTAA | 1428 |
| RNA_ligation3_84 | CTCTTAAACACTCTTTCCCTAC | | | |
| EasySci- | AATGATACGGCGACCACCGAGATCTACACAAT | 1045 | AATCCAATAA | 1429 |
| RNA_ligation3_85 | CCAATAAACACTCTTTCCCTAC | | | |
| EasySci- | AATGATACGGCGACCACCGAGATCTACACCTA | 1046 | CTAGCAGGAT | 1430 |
| RNA_ligation3_86 | GCAGGATACACTCTTTCCCTAC | | | |
| EasySci- | AATGATACGGCGACCACCGAGATCTACACTGG | 1047 | TGGTCTCGGA | 1431 |
| RNA_ligation3_87 | TCTCGGAACACTCTTTCCCTAC | | | |
| EasySci- | AATGATACGGCGACCACCGAGATCTACACCCG | 1048 | CCGAGTACTA | 1432 |
| RNA_ligation3_88 | AGTACTAACACTCTTTCCCTAC | | | |
| EasySci- | AATGATACGGCGACCACCGAGATCTACACGAT | 1049 | GATGACGAAG | 1433 |
| RNA_ligation3_89 | GACGAAGACACTCTTTCCCTAC | | | |
| EasySci- | AATGATACGGCGACCACCGAGATCTACACGGC | 1050 | GGCAGTCTTC | 1434 |
| RNA_ligation3_90 | AGTCTTCACACTCTTTCCCTAC | | | |
| Easy_Sci- | AATGATACGGCGACCACCGAGATCTACACAAT | 1051 | AATACGAATA | 1435 |
| RNA_ligation3_91 | ACGAATAACACTCTTTCCCTAC | | | |
| EasySci- | AATGATACGGCGACCACCGAGATCTACACACC | 1052 | ACCTAGGAGA | 1436 |
| RNA_ligation3_92 | TAGGAGAACACTCTTTCCCTAC | | | |
| EasySci- | AATGATACGGCGACCACCGAGATCTACACGAA | 1053 | GAAGCGCCAA | 1437 |
| RNA_ligation3_93 | GCGCCAAACACTCTTTCCCTAC | | | |
| EasySci- | AATGATACGGCGACCACCGAGATCTACACCGT | 1054 | CGTTACGTTG | 1438 |
| RNA_ligation3_94 | TACGTTGACACTCTTTCCCTAC | | | |
| EasySci- | AATGATACGGCGACCACCGAGATCTACACGTC | 1055 | GTCGCGAATA | 1439 |
| RNA_ligation3_95 | GCGAATAACACTCTTTCCCTAC | | | |
| EasySci- | AATGATACGGCGACCACCGAGATCTACACTTA | 1056 | TTAGAGCCTG | 1440 |
| RNA_ligation3_96 | GAGCCTGACACTCTTTCCCTAC | | | |
| EasySci- | AATGATACGGCGACCACCGAGATCTACACACG | 1057 | ACGGTCATCA | 1441 |
| RNA_ligation4_01 | GTCATCAACACTCTTTCCCTAC | | | |
| EasySci- | AATGATACGGCGACCACCGAGATCTACACACG | 1058 | ACGTAGCAGG | 1442 |
| RNA_ligation4_02 | TAGCAGGACACTCTTTCCCTAC | | | |
| EasySci- | AATGATACGGCGACCACCGAGATCTACACCGA | 1059 | CGACCGAGAG | 1443 |
| RNA_ligation4_03 | CCGAGAGACACTCTTTCCCTAC | | | |
| EasySci- | AATGATACGGCGACCACCGAGATCTACACAAG | 1060 | AAGCGGTTCT | 1444 |
| RNA_ligation4_04 | CGGTTCTACACTCTTTCCCTAC | | | |
| EasySci- | AATGATACGGCGACCACCGAGATCTACACTCG | 1061 | TCGGAATAAC | 1445 |
| RNA_ligation4_05 | GAATAACACACTCTTTCCCTAC | | | |
| EasySci- | AATGATACGGCGACCACCGAGATCTACACAAG | 1062 | AAGTTCGCTG | 1446 |
| RNA_ligation4_06 | TTCGCTGACACTCTTTCCCTAC | | | |
| EasySci- | AATGATACGGCGACCACCGAGATCTACACAAT | 1063 | AATAATCGGT | 1447 |
| RNA_ligation4_07 | AATCGGTACACTCTTTCCCTAC | | | |
| EasySci- | AATGATACGGCGACCACCGAGATCTACACAGG | 1064 | AGGCGAAGGC | 1448 |
| RNA_ligation4_08 | CGAAGGCACACTCTTTCCCTAC | | | |
| EasySci- | AATGATACGGCGACCACCGAGATCTACACAAG | 1065 | AAGCCGCCGC | 1449 |
| RNA_ligation4_09 | CCGCCGCACACTCTTTCCCTAC | | | |
| EasySci- | AATGATACGGCGACCACCGAGATCTACACTCG | 1066 | TCGGCCGATG | 1450 |
| RNA_ligation4_10 | GCCGATGACACTCTTTCCCTAC | | | |
| EasySci- | AATGATACGGCGACCACCGAGATCTACACAGC | 1067 | AGCGACTGCT | 1451 |
| RNA_ligation4_11 | GACTGCTACACTCTTTCCCTAC | | | |
| EasySci- | AATGATACGGCGACCACCGAGATCTACACCTT | 1068 | CTTAATGAGC | 1452 |
| RNA_ligation4_12 | AATGAGCACACTCTTTCCCTAC | | | |
| EasySci- | AATGATACGGCGACCACCGAGATCTACACAAT | 1069 | AATTCCTCTC | 1453 |
| RNA_ligation4_13 | TCCTCTCACACTCTTTCCCTAC | | | |
| EasySci- | AATGATACGGCGACCACCGAGATCTACACGCT | 1070 | GCTGGTCTCC | 1454 |
| RNA_ligation4_14 | GGTCTCCACACTCTTTCCCTAC | | | |
| EasySci- | AATGATACGGCGACCACCGAGATCTACACAGT | 1071 | AGTATTGCTA | 1455 |
| RNA_ligation4_15 | ATTGCTAACACTCTTTCCCTAC | | | |
| EasySci- | AATGATACGGCGACCACCGAGATCTACACTCT | 1072 | TCTAGGATAA | 1456 |
| RNA_ligation4_16 | AGGATAAACACTCTTTCCCTAC | | | |
| EasySci- | AATGATACGGCGACCACCGAGATCTACACGGT | 1073 | GGTCCTGCAA | 1457 |
| RNA_ligation4_17 | CCTGCAAACACTCTTTCCCTAC | | | |
| EasySci- | AATGATACGGCGACCACCGAGATCTACACCGC | 1074 | CGCTTCAATT | 1458 |
| RNA_ligation4_18 | TTCAATTACACTCTTTCCCTAC | | | |
| EasySci- | AATGATACGGCGACCACCGAGATCTACACGGA | 1075 | GGATTATTAT | 1459 |
| RNA_ligation4_19 | TTATTATACACTCTTTCCCTAC | | | |
| EasySci- | AATGATACGGCGACCACCGAGATCTACACTCC | 1076 | TCCGGCTGAT | 1460 |
| RNA_ligation4_20 | GGCTGATACACTCTTTCCCTAC | | | |
| EasySci- | AATGATACGGCGACCACCGAGATCTACACCCG | 1077 | CCGCCTCGTT | 1461 |
| RNA_ligation4_21 | CCTCGTTACACTCTTTCCCTAC | | | |
| EasySci- | AATGATACGGCGACCACCGAGATCTACACTTA | 1078 | TTATAATCAA | 1462 |
| RNA_ligation4_22 | TAATCAAACACTCTTTCCCTAC | | | |
| EasySci- | AATGATACGGCGACCACCGAGATCTACACCCA | 1079 | CCATTGAACG | 1463 |
| RNA_ligation4_23 | TTGAACGACACTCTTTCCCTAC | | | |
| EasySci- | AATGATACGGCGACCACCGAGATCTACACACT | 1080 | ACTCCAACGG | 1464 |
| RNA_ligation4_24 | CCAACGGACACTCTTTCCCTAC | | | |
| EasySci- | AATGATACGGCGACCACCGAGATCTACACACC | 1081 | ACCTCCTGAA | 1465 |
| RNA_ligation4_25 | TCCTGAAACACTCTTTCCCTAC | | | |
| EasySci- | AATGATACGGCGACCACCGAGATCTACACAGA | 1082 | AGAGGCCGGC | 1466 |
| RNA_ligation4_26 | GGCCGGCACACTCTTTCCCTAC | | | |
| EasySci- | AATGATACGGCGACCACCGAGATCTACACCTG | 1083 | CTGCCTCTTC | 1467 |
| RNA_ligation4_27 | CCTCTTCACACTCTTTCCCTAC | | | |
| EasySci- | AATGATACGGCGACCACCGAGATCTACACCAG | 1084 | CAGTATCCTT | 1468 |
| RNA_ligation4_28 | TATCCTTACACTCTTTCCCTAC | | | |
| EasySci- | AATGATACGGCGACCACCGAGATCTACACGTC | 1085 | GTCAACTAGC | 1469 |
| RNA_ligation4_29 | AACTAGCACACTCTTTCCCTAC | | | |
| EasySci- | AATGATACGGCGACCACCGAGATCTACACTGA | 1086 | TGACGCAGTC | 1470 |
| RNA_ligation4_30 | CGCAGTCACACTCTTTCCCTAC | | | |
| EasySci- | AATGATACGGCGACCACCGAGATCTACACGTC | 1087 | GTCAATACGA | 1471 |
| RNA_ligation4_31 | AATACGAACACTCTTTCCCTAC | | | |
| EasySci- | AATGATACGGCGACCACCGAGATCTACACTGA | 1088 | TGAACTTCGA | 1472 |
| RNA_ligation4_32 | ACTTCGAACACTCTTTCCCTAC | | | |
| EasySci- | AATGATACGGCGACCACCGAGATCTACACCGT | 1089 | CGTACCAACG | 1473 |
| RNA_ligation4_33 | ACCAACGACACTCTTTCCCTAC | | | |
| EasySci- | AATGATACGGCGACCACCGAGATCTACACAGA | 1090 | AGAGATGAAT | 1474 |
| RNA_ligation4_34 | GATGAATACACTCTTTCCCTAC | | | |
| EasySci- | AATGATACGGCGACCACCGAGATCTACACTAT | 1091 | TATTCCAATT | 1475 |
| RNA_ligation4_35 | TCCAATTACACTCTTTCCCTAC | | | |
| EasySci- | AATGATACGGCGACCACCGAGATCTACACGGA | 1092 | GGATGCGATT | 1476 |
| RNA_ligation4_36 | TGCGATTACACTCTTTCCCTAC | | | |
| EasySci- | AATGATACGGCGACCACCGAGATCTACACGTA | 1093 | GTAACCAGGT | 1477 |
| RNA_ligation4_37 | ACCAGGTACACTCTTTCCCTAC | | | |
| EasySci- | AATGATACGGCGACCACCGAGATCTACACCCT | 1094 | CCTCGTCATA | 1478 |
| RNA_ligation4_38 | CGTCATAACACTCTTTCCCTAC | | | |
| EasySci- | AATGATACGGCGACCACCGAGATCTACACAAT | 1095 | AATGGTCTTA | 1479 |
| RNA_ligation4_39 | GGTCTTAACACTCTTTCCCTAC | | | |
| EasySci- | AATGATACGGCGACCACCGAGATCTACACATG | 1096 | ATGAATGCCT | 1480 |
| RNA_ligation4_40 | AATGCCTACACTCTTTCCCTAC | | | |
| EasySci- | AATGATACGGCGACCACCGAGATCTACACGTC | 1097 | GTCCGTAGAT | 1481 |
| RNA_ligation4_41 | CGTAGATACACTCTTTCCCTAC | | | |
| EasySci- | AATGATACGGCGACCACCGAGATCTACACCCA | 1098 | CCATCCTAGT | 1482 |
| RNA_ligation4_42 | TCCTAGTACACTCTTTCCCTAC | | | |
| EasySci- | AATGATACGGCGACCACCGAGATCTACACTGG | 1099 | TGGTTCCTAC | 1483 |
| RNA_ligation4_43 | TTCCTACACACTCTTTCCCTAC | | | |
| EasySci- | AATGATACGGCGACCACCGAGATCTACACGCG | 1100 | GCGCCTTCCG | 1484 |
| RNA_ligation4_44 | CCTTCCGACACTCTTTCCCTAC | | | |
| EasySci- | AATGATACGGCGACCACCGAGATCTACACCGT | 1101 | CGTACTACGC | 1485 |
| RNA_ligation4_45 | ACTACGCACACTCTTTCCCTAC | | | |
| EasySci- | AATGATACGGCGACCACCGAGATCTACACGGC | 1102 | GGCCGCGGTT | 1486 |
| RNA_ligation4_46 | CGCGGTTACACTCTTTCCCTAC | | | |
| EasySci- | AATGATACGGCGACCACCGAGATCTACACTGG | 1103 | TGGATAGTTG | 1487 |
| RNA_ligation4_47 | ATAGTTGACACTCTTTCCCTAC | | | |
| EasySci- | AATGATACGGCGACCACCGAGATCTACACCGG | 1104 | CGGCGCCAGG | 1488 |
| RNA_ligation4_48 | CGCCAGGACACTCTTTCCCTAC | | | |
| EasySci- | AATGATACGGCGACCACCGAGATCTACACCAA | 1105 | CAAGCTCAGG | 1489 |
| RNA_ligation4_49 | GCTCAGGACACTCTTTCCCTAC | | | |
| EasySci- | AATGATACGGCGACCACCGAGATCTACACATC | 1106 | ATCATCCTTC | 1490 |
| RNA_ligation4_50 | ATCCTTCACACTCTTTCCCTAC | | | |
| EasySci- | AATGATACGGCGACCACCGAGATCTACACCCT | 1107 | CCTCCGGAGT | 1491 |
| RNA_ligation4_51 | CCGGAGTACACTCTTTCCCTAC | | | |
| EasySci- | AATGATACGGCGACCACCGAGATCTACACCCA | 1108 | CCATTGCTGG | 1492 |
| RNA_ligation4_52 | TTGCTGGACACTCTTTCCCTAC | | | |
| EasySci- | AATGATACGGCGACCACCGAGATCTACACTAT | 1109 | TATTCGCAGT | 1493 |
| RNA_ligation4_53 | TCGCAGTACACTCTTTCCCTAC | | | |
| EasySci- | AATGATACGGCGACCACCGAGATCTACACCCG | 1110 | CCGGTTAAGT | 1494 |
| RNA_ligation4_54 | GTTAAGTACACTCTTTCCCTAC | | | |
| EasySci- | AATGATACGGCGACCACCGAGATCTACACATA | 1111 | ATATTCTACC | 1495 |
| RNA_ligation4_55 | TTCTACCACACTCTTTCCCTAC | | | |
| EasySci- | AATGATACGGCGACCACCGAGATCTACACTAC | 1112 | TACGGATCGT | 1496 |
| RNA_ligation4_56 | GGATCGTACACTCTTTCCCTAC | | | |
| EasySci- | AATGATACGGCGACCACCGAGATCTACACTTC | 1113 | TTCTCTCCAG | 1497 |
| RNA_ligation4_57 | TCTCCAGACACTCTTTCCCTAC | | | |
| EasySci- | AATGATACGGCGACCACCGAGATCTACACCCA | 1114 | CCAAGAGCAA | 1498 |
| RNA_ligation4_58 | AGAGCAAACACTCTTTCCCTAC | | | |
| EasySci- | AATGATACGGCGACCACCGAGATCTACACTTG | 1115 | TTGGTTCGAG | 1499 |
| RNA_ligation4_59 | GTTCGAGACACTCTTTCCCTAC | | | |
| EasySci- | AATGATACGGCGACCACCGAGATCTACACAAC | 1116 | AACGGATTAC | 1500 |
| RNA_ligation4_60 | GGATTACACACTCTTTCCCTAC | | | |
| EasySci- | AATGATACGGCGACCACCGAGATCTACACCAT | 1117 | CATCTTCAGA | 1501 |
| RNA_ligation4_61 | CTTCAGAACACTCTTTCCCTAC | | | |
| EasySci- | AATGATACGGCGACCACCGAGATCTACACTTG | 1118 | TTGAACCTCC | 1502 |
| RNA_ligation4_62 | AACCTCCACACTCTTTCCCTAC | | | |
| EasySci- | AATGATACGGCGACCACCGAGATCTACACGGA | 1119 | GGAATTCCAA | 1503 |
| RNA_ligation4_63 | ATTCCAAACACTCTTTCCCTAC | | | |
| EasySci- | AATGATACGGCGACCACCGAGATCTACACATA | 1120 | ATAGGTCCAA | 1504 |
| RNA_ligation4_64 | GGTCCAAACACTCTTTCCCTAC | | | |
| EasySci- | AATGATACGGCGACCACCGAGATCTACACGCC | 1121 | GCCATGGTAC | 1505 |
| RNA_ligation4_65 | ATGGTACACACTCTTTCCCTAC | | | |
| EasySci- | AATGATACGGCGACCACCGAGATCTACACGAG | 1122 | GAGCTCTTCA | 1506 |
| RNA_ligation4_66 | CTCTTCAACACTCTTTCCCTAC | | | |
| EasySci- | AATGATACGGCGACCACCGAGATCTACACCCG | 1123 | CCGAGGCAAC | 1507 |
| RNA_ligation4_67 | AGGCAACACACTCTTTCCCTAC | | | |
| EasySci- | AATGATACGGCGACCACCGAGATCTACACGTC | 1124 | GTCTCTAGTT | 1508 |
| RNA_ligation4_68 | TCTAGTTACACTCTTTCCCTAC | | | |
| EasvSci- | AATGATACGGCGACCACCGAGATCTACACGCT | 1125 | GCTGGTTATA | 1509 |
| RNA_ligation4_69 | GGTTATAACACTCTTTCCCTAC | | | |
| EasySci- | AATGATACGGCGACCACCGAGATCTACACTCG | 1126 | TCGTAGGTCA | 1510 |
| RNA_ligation4_70 | TAGGTCAACACTCTTTCCCTAC | | | |
| EasySci- | AATGATACGGCGACCACCGAGATCTACACAAC | 1127 | AACTCAGACG | 1511 |
| RNA_ligation4_71 | TCAGACGACACTCTTTCCCTAC | | | |
| EasySci- | AATGATACGGCGACCACCGAGATCTACACTGC | 1128 | TGCTGCCGGA | 1512 |
| RNA_ligation4_72 | TGCCGGAACACTCTTTCCCTAC | | | |
| EasySci- | AATGATACGGCGACCACCGAGATCTACACTGG | 1129 | TGGAGGCAAG | 1513 |
| RNA_ligation4_73 | AGGCAAGACACTCTTTCCCTAC | | | |
| EasySci- | AATGATACGGCGACCACCGAGATCTACACACT | 1130 | ACTGATGCGA | 1514 |
| RNA_ligation4_74 | GATGCGAACACTCTTTCCCTAC | | | |
| EasySci- | AATGATACGGCGACCACCGAGATCTACACACG | 1131 | ACGACTCCTC | 1515 |
| RNA_ligation4_75 | ACTCCTCACACTCTTTCCCTAC | | | |
| EasySci- | AATGATACGGCGACCACCGAGATCTACACTGG | 1132 | TGGCAGCGAA | 1516 |
| RNA_ligation4_76 | CAGCGAAACACTCTTTCCCTAC | | | |
| EasySci- | AATGATACGGCGACCACCGAGATCTACACCCG | 1133 | CCGATACTCT | 1517 |
| RNA_ligation4_77 | ATACTCTACACTCTTTCCCTAC | | | |
| EasySci- | AATGATACGGCGACCACCGAGATCTACACCAA | 1134 | CAATATAGGC | 1518 |
| RNA_ligation4_78 | TATAGGCACACTCTTTCCCTAC | | | |
| EasySci- | AATGATACGGCGACCACCGAGATCTACACACC | 1135 | ACCGGCCGAC | 1519 |
| RNA_ligation4_79 | GGCCGACACACTCTTTCCCTAC | | | |
| EasySci- | AATGATACGGCGACCACCGAGATCTACACAAT | 1136 | AATAAGGCTC | 1520 |
| RNA_ligation4_80 | AAGGCTCACACTCTTTCCCTAC | | | |
| EasySci- | AATGATACGGCGACCACCGAGATCTACACCAT | 1137 | CATCATAGCA | 1521 |
| RNA_ligation4_81 | CATAGCAACACTCTTTCCCTAC | | | |
| EasySci- | AATGATACGGCGACCACCGAGATCTACACGAT | 1138 | GATGATCCAT | 1522 |
| RNA_ligation4_82 | GATCCATACACTCTTTCCCTAC | | | |
| EasySci- | AATGATACGGCGACCACCGAGATCTACACATG | 1139 | ATGGCAATAC | 1523 |
| RNA_ligation4_83 | GCAATACACACTCTTTCCCTAC | | | |
| EasySci- | AATGATACGGCGACCACCGAGATCTACACACC | 1140 | ACCAGAACCA | 1524 |
| RNA_ligation4_84 | AGAACCAACACTCTTTCCCTAC | | | |
| EasySci- | AATGATACGGCGACCACCGAGATCTACACGGT | 1141 | GGTTCGACCT | 1525 |
| RNA_ligation4_85 | TCGACCTACACTCTTTCCCTAC | | | |
| EasySci- | AATGATACGGCGACCACCGAGATCTACACCTT | 1142 | CTTGGACGGA | 1526 |
| RNA_ligation4_86 | GGACGGAACACTCTTTCCCTAC | | | |
| EasySci- | AATGATACGGCGACCACCGAGATCTACACCGG | 1143 | CGGTCTCATA | 1527 |
| RNA_ligation4_87 | TCTCATAACACTCTTTCCCTAC | | | |
| EasySci- | AATGATACGGCGACCACCGAGATCTACACAAT | 1144 | AATCAGAGCC | 1528 |
| RNA_ligation4_88 | CAGAGCCACACTCTTTCCCTAC | | | |
| EasySci- | AATGATACGGCGACCACCGAGATCTACACCCT | 1145 | CCTGAATACT | 1529 |
| RNA_ligation4_89 | GAATACTACACTCTTTCCCTAC | | | |
| EasySci- | AATGATACGGCGACCACCGAGATCTACACCTT | 1146 | CTTGGAGACT | 1530 |
| RNA_ligation4_90 | GGAGACTACACTCTTTCCCTAC | | | |
| EasySci- | AATGATACGGCGACCACCGAGATCTACACAAG | 1147 | AAGACCTTAC | 1531 |
| RNA_ligation4_91 | ACCTTACACACTCTTTCCCTAC | | | |
| EasySci- | AATGATACGGCGACCACCGAGATCTACACGCG | 1148 | GCGAGCGCTC | 1532 |
| RNA_ligation4_92 | AGCGCTCACACTCTTTCCCTAC | | | |
| EasySci- | AATGATACGGCGACCACCGAGATCTACACTCG | 1149 | TCGCAAGACG | 1533 |
| RNA_ligation4_93 | CAAGACGACACTCTTTCCCTAC | | | |
| EasySci- | AATGATACGGCGACCACCGAGATCTACACCAA | 1150 | CAATCTCGGA | 1534 |
| RNA_ligation4_94 | TCTCGGAACACTCTTTCCCTAC | | | |
| EasySci- | AATGATACGGCGACCACCGAGATCTACACTCG | 1151 | TCGACCTACC | 1535 |
| RNA_ligation4_95 | ACCTACCACACTCTTTCCCTAC | | | |
| EasySci- | AATGATACGGCGACCACCGAGATCTACACTTA | 1152 | TTATAGGCAT | 1536 |
| RNA_ligation4_96 | TAGGCATACACTCTTTCCCTAC | | | |

### Adaptor: Common Ligation Adaptor Sequence

(SEQ ID NO: 2445)
A*G*A*T*C*G*G*A*A*G*A*G*C*G*T*C*G*T*G*T*A*G*G*G*
A*A*A*G*A*G*T*G*T*/3ddC/

[0524] ‘*’ represents phosphorothioate bonds between nucleotides, which prevents the tagmentation of the oligo. /3ddC/′ represents a dideoxycytidine modification, which prevents the extension of the oligo on the 3′ end by DNA polymerases.

### Pool/Centrifuge/Resuspend/Redistribute/Quantify (30 m)

[0525] Centrifuge the tube for 3 minutes, 1000 g at 4 C. Pipet out the supernatant.
[0526] Resuspend the nuclei in 1 mL NBB. Move into a microcentrifuge tube. Centrifuge the tube for 3 minutes, 1000 g at 4 C. Dump the supernatant.
[0527] Resuspend the nuclei in 500 μL NBB Filter the nuclei using a 40 μM filter and then wash the filter with an additional 250 μL NBB. Centrifuge the tube for 3 minutes, 1000 g at 4 C. Dump the supernatant.
[0528] Resuspend the nuclei in 500 μL NBB for nuclei counting—it is recommended to use a fluorescent microscope with a solution with DAPI to distinguish nuclei from debris.
[0529] Distribute the nuclei into a 96 well plate with 10,000 nuclei per well, suspended in 4 μL total volume (final concentration=2,500 nuclei/μL).
   [0530] *NOTE. Can directly freeze and store cells at this point, but it is recommended to proceed directly to second-strand synthesis as dsDNA should be more stable in storage compared to ssDNA*
   [0531] *If choosing to freeze, it is okay to place directly in −80 C freezer without flash-freezing* *it is possible to store nuclei directly into PCR strips if profiling a whole plate of cells is not needed*

### Second-Strand Synthesis (1 h 15 m)

[0532] Thaw Second-Strand Synthesis buffer in room temperature
[0533] Prepare Second-Strand Synthesis mix: for each well, add ⅔ μL Second-Strand Synthesis buffer+⅓ μL Second-Strand Synthesis Enzyme Mix.
[0534] Perform Second-Strand Synthesis: in Thermocycler, incubate samples at 16 C for one hour. (STOP POINT)

### 0.8× Ampure Beads Purification (˜1 hr for One Plate)

[0535] Take one plate of prepared cells after Second-Strand Synthesis and add SuL DNA binding buffer to each well, mix, and let the resulting solution sit for 5 minutes at room temperature.
   [0536] *Can also perform this protocol with PCR strips if there is no need to profile a whole plate*
[0537] Add 8 μL ampure beads to each well, mix well via pipetting, and let the resulting solution sit for 5 minutes at room temperature.
[0538] Place the solution on a magnetic rack and let the solution sit for 5 minutes.
[0539] Remove the resulting supernatant and add SOUL of 80% ethanol (do not mix up and down). Remove the ethanol.
[0540] Wash one more time with 50 μL of 80% ethanol (do not mix up and down). Remove the ethanol, centrifuge the pellet down, place the plate on the magnetic rack, and remove the remaining residual ethanol.
[0541] Take the plate off of the magnetic rack and elute the beads in 7.6 μL of elution buffer. Incubate the solution for three minutes at room temperature.
[0542] Place the plate back on the magnetic rack and let the plate sit for three minutes at room temperature Aspirate 6.6 μL of solution without touching the magnetic beads and transfer the solution into a new plate.

### Tagmentation (10 m)

[0543] Prepare a mixture of 1:100 Tagmentase: Tagmentation Buffer mix. Add 6.6 μL of the mix to each well and pipet up and down to mix.
[0544] Incubate plate in the thermocycler at 55 C for 5 minutes. Place on ice immediately following the reaction.

### SDS Treatment (45 m)

[0545] For each well, add a mixture of:
   [0546] 0.4 μL 1% SDS
   [0547] 0.4 μL BSA
   [0548] 2 μL 10 μM Universal P5 Primer
[0549] Incubate the plate at 55 C for 15 minutes. Place the plate on ice immediately following the reaction.
[0550] Add 2 μL 10% Tween-20 to each well.
[0551] Add 2 μL Indexed p7 primer to each well (Table 6). Centrifuge the plate after this step.

TABLE 6
P7 PCR primer sequences

| | | SEQ ID | | SEQ ID |
|---|---|---|---|---|
| Name | Sequence | NO: | Barcode | NO: |
| EasySci-RNA_P7- | CAAGCAGAAGACGGCATACGAGATccgaatccga | 1537 | TCGGATTCGG | 1921 |
| 1_01 | GTCTCGTGGGCTCGG | | | |
| EasySci-RNA_P7- | CAAGCAGAAGACGGCATACGAGATataagccgga | 1538 | TCCGGCTTAT | 1922 |
| 1_02 | GTCTCGTGGGCTCGG | | | |
| EasySci-RNA_P7- | CAAGCAGAAGACGGCATACGAGATccggcggcg | 1539 | TCGCCGCCGG | 1923 |
| 1_03 | aGTCTCGTGGGCTCGG | | | |
| EasySci-RNA_P7- | CAAGCAGAAGACGGCATACGAGATggcttgccaa | 1540 | TTGGCAAGCC | 1924 |
| 1_04 | GTCTCGTGGGCTCGG | | | |
| EasySci-RNA_P7- | CAAGCAGAAGACGGCATACGAGATccgctagctg | 1541 | CAGCTAGCGG | 1925 |
| 1_05 | GTCTCGTGGGCTCGG | | | |
| EasySci-RNA_P7- | CAAGCAGAAGACGGCATACGAGATcttatcctacG | 1542 | GTAGGATAAG | 1926 |
| 1_06 | TCTCGTGGGCTCGG | | | |
| EasySci-RNA_P7- | CAAGCAGAAGACGGCATACGAGATtgagctacttG | 1543 | AAGTAGCTCA | 1927 |
| 1_07 | TCTCGTGGGCTCGG | | | |
| EasySci-RNA_P7- | CAAGCAGAAGACGGCATACGAGATtcaggactta | 1544 | TAAGTCCTGA | 1928 |
| 1_08 | GTCTCGTGGGCTCGG | | | |
| EasySci-RNA_P7- | CAAGCAGAAGACGGCATACGAGATccgcagccgc | 1545 | GCGGCTGCGG | 1929 |
| 1_09 | GTCTCGTGGGCTCGG | | | |
| EasySci-RNA_P7- | CAAGCAGAAGACGGCATACGAGATtgcgcctggt | 1546 | ACCAGGCGCA | 1930 |
| 1_10 | GTCTCGTGGGCTCGG | | | |
| EasySci-RNA_P7- | CAAGCAGAAGACGGCATACGAGATaatcatacgg | 1547 | CCGTATGATT | 1931 |
| 1_11 | GTCTCGTGGGCTCGG | | | |
| EasySci-RNA_P7- | CAAGCAGAAGACGGCATACGAGATcgccaatcaa | 1548 | TTGATTGGCG | 1932 |
| 1_12 | GTCTCGTGGGCTCGG | | | |
| EasySci-RNA_P7- | CAAGCAGAAGACGGCATACGAGATcaaggcttag | 1549 | CTAAGCCTTG | 1933 |
| 1_13 | GTCTCGTGGGCTCGG | | | |
| EasySci-RNA_P7- | CAAGCAGAAGACGGCATACGAGATgcgctcgacg | 1550 | CGTCGAGCGC | 1934 |
| 1_14 | GTCTCGTGGGCTCGG | | | |
| EasySci-RNA_P7- | CAAGCAGAAGACGGCATACGAGATtccagcaata | 1551 | TATTGCTGGA | 1935 |
| 1_15 | GTCTCGTGGGCTCGG | | | |
| EasySci-RNA_P7- | CAAGCAGAAGACGGCATACGAGATcatgagaact | 1552 | AGTTCTCATG | 1936 |
| 1_16 | GTCTCGTGGGCTCGG | | | |
| EasySci-RNA_P7- | CAAGCAGAAGACGGCATACGAGATaacgtaatct | 1553 | AGATTACGTT | 1937 |
| 1_17 | GTCTCGTGGGCTCGG | | | |
| EasySci-RNA_P7- | CAAGCAGAAGACGGCATACGAGATattctcctctG | 1554 | AGAGGAGAAT | 1938 |
| 1_18 | TCTCGTGGGCTCGG | | | |
| EasySci-RNA_P7- | CAAGCAGAAGACGGCATACGAGATtctgcgcgtt | 1555 | AACGCGCAGA | 1939 |
| 1_19 | GTCTCGTGGGCTCGG | | | |
| EasySci-RNA_P7- | CAAGCAGAAGACGGCATACGAGATgctcatatgc | 1556 | GCATATGAGC | 1940 |
| 1_20 | GTCTCGTGGGCTCGG | | | |
| EasySci-RNA_P7- | CAAGCAGAAGACGGCATACGAGATagcggtaacg | 1557 | CGTTACCGCT | 1941 |
| 1_21 | GTCTCGTGGGCTCGG | | | |
| EasySci-RNA_P7- | CAAGCAGAAGACGGCATACGAGATaatgaatagt | 1558 | ACTATTCATT | 1942 |
| 1_22 | GTCTCGTGGGCTCGG | | | |
| EasySci-RNA_P7- | CAAGCAGAAGACGGCATACGAGATccgtatctgg | 1559 | CCAGATACGG | 1943 |
| 1_23 | GTCTCGTGGGCTCGG | | | |
| EasySci-RNA_P7- | CAAGCAGAAGACGGCATACGAGATccttagtctgG | 1560 | CAGACTAAGG | 1944 |
| 1_24 | TCTCGTGGGCTCGG | | | |
| EasySci-RNA_P7- | CAAGCAGAAGACGGCATACGAGATacctagttag | 1561 | CTAACTAGGT | 1945 |
| 1_25 | GTCTCGTGGGCTCGG | | | |
| EasySci-RNA_P7- | CAAGCAGAAGACGGCATACGAGATataggagtac | 1562 | GTACTCCTAT | 1946 |
| 1_26 | GTCTCGTGGGCTCGG | | | |
| EasySci-RNA_P7- | CAAGCAGAAGACGGCATACGAGATctacgacgag | 1563 | CTCGTCGTAG | 1947 |
| 1_27 | GTCTCGTGGGCTCGG | | | |
| EasySci-RNA_P7- | CAAGCAGAAGACGGCATACGAGATagtcgagttc | 1564 | GAACTCGACT | 1948 |
| 1_28 | GTCTCGTGGGCTCGG | | | |
| EasySci-RNA_P7- | CAAGCAGAAGACGGCATACGAGATtggtccagtc | 1565 | GACTGGACCA | 1949 |
| 1_29 | GTCTCGTGGGCTCGG | | | |
| EasySci-RNA_P7- | CAAGCAGAAGACGGCATACGAGATatctaagcaa | 1566 | TTGCTTAGAT | 1950 |
| 1_30 | GTCTCGTGGGCTCGG | | | |
| EasySci-RNA_P7- | CAAGCAGAAGACGGCATACGAGATcgaattcgttG | 1567 | AACGAATTCG | 1951 |
| 1_31 | TCTCGTGGGCTCGG | | | |
| EasySci-RNA_P7- | CAAGCAGAAGACGGCATACGAGATcagcgataga | 1568 | TCTATCGCTG | 1952 |
| 1_32 | GTCTCGTGGGCTCGG | | | |
| EasySci-RNA_P7- | CAAGCAGAAGACGGCATACGAGATggtcgctatg | 1569 | CATAGCGACC | 1953 |
| 1_33 | GTCTCGTGGGCTCGG | | | |
| EasySci-RNA_P7- | CAAGCAGAAGACGGCATACGAGATatccgttagc | 1570 | GCTAACGGAT | 1954 |
| 1_34 | GTCTCGTGGGCTCGG | | | |
| EasySci-RNA_P7- | CAAGCAGAAGACGGCATACGAGATtcgcaattag | 1571 | CTAATTGCGA | 1955 |
| 1_35 | GTCTCGTGGGCTCGG | | | |
| EasySci-RNA_P7- | CAAGCAGAAGACGGCATACGAGATggctggctag | 1572 | CTAGCCAGCC | 1956 |
| 1_36 | GTCTCGTGGGCTCGG | | | |
| EasySci-RNA_P7- | CAAGCAGAAGACGGCATACGAGATacggtcttgc | 1573 | GCAAGACCGT | 1957 |
| 1_37 | GTCTCGTGGGCTCGG | | | |
| EasySci-RNA_P7- | CAAGCAGAAGACGGCATACGAGATgctccattcg | 1574 | CGAATGGAGC | 1958 |
| 1_38 | GTCTCGTGGGCTCGG | | | |
| EasySci-RNA_P7- | CAAGCAGAAGACGGCATACGAGATacgataagcg | 1575 | CGCTTATCGT | 1959 |
| 1_39 | GTCTCGTGGGCTCGG | | | |
| EasySci-RNA_P7- | CAAGCAGAAGACGGCATACGAGATaccatagcgc | 1576 | GCGCTATGGT | 1960 |
| 1_40 | GTCTCGTGGGCTCGG | | | |
| EasySci-RNA_P7- | CAAGCAGAAGACGGCATACGAGATctcttagcgg | 1577 | CCGCTAAGAG | 1961 |
| 1_41 | GTCTCGTGGGCTCGG | | | |
| EasySci-RNA_P7- | CAAGCAGAAGACGGCATACGAGATtgattcaactG | 1578 | AGTTGAATCA | 1962 |
| 1_42 | TCTCGTGGGCTCGG | | | |
| EasySci-RNA_P7- | CAAGCAGAAGACGGCATACGAGATtatggccgcg | 1579 | CGCGGCCATA | 1963 |
| 1_43 | GTCTCGTGGGCTCGG | | | |
| EasySci-RNA_P7- | CAAGCAGAAGACGGCATACGAGATagaggtcgca | 1580 | TGCGACCTCT | 1964 |
| 1_44 | GTCTCGTGGGCTCGG | | | |
| EasySci-RNA_P7- | CAAGCAGAAGACGGCATACGAGATaggagattga | 1581 | TCAATCTCCT | 1965 |
| 1_45 | GTCTCGTGGGCTCGG | | | |
| EasySci-RNA_P7- | CAAGCAGAAGACGGCATACGAGATggctatatag | 1582 | CTATATAGCC | 1966 |
| 1_46 | GTCTCGTGGGCTCGG | | | |
| EasySci-RNA_P7- | CAAGCAGAAGACGGCATACGAGATtcgcgtacttG | 1583 | AAGTACGCGA | 1967 |
| 1_47 | TCTCGTGGGCTCGG | | | |
| EasySci-RNA_P7- | CAAGCAGAAGACGGCATACGAGATaataataatg | 1584 | CATTATTATT | 1968 |
| 1_48 | GTCTCGTGGGCTCGG | | | |
| EasySci-RNA_P7- | CAAGCAGAAGACGGCATACGAGATttcgttccatG | 1585 | ATGGAACGAA | 1969 |
| 1_49 | TCTCGTGGGCTCGG | | | |
| EasySci-RNA_P7- | CAAGCAGAAGACGGCATACGAGATtacctaatca | 1586 | TGATTAGGTA | 1970 |
| 1_50 | GTCTCGTGGGCTCGG | | | |
| EasySci-RNA_P7- | CAAGCAGAAGACGGCATACGAGATaagtaatattG | 1587 | AATATTACTT | 1971 |
| 1_51 | TCTCGTGGGCTCGG | | | |
| EasySci-RNA_P7- | CAAGCAGAAGACGGCATACGAGATagctaagaat | 1588 | ATTCTTAGCT | 1972 |
| 1_52 | GTCTCGTGGGCTCGG | | | |
| EasySci-RNA_P7- | CAAGCAGAAGACGGCATACGAGATgtcgaggtat | 1589 | ATACCTCGAC | 1973 |
| 1_53 | GTCTCGTGGGCTCGG | | | |
| EasySci-RNA_P7- | CAAGCAGAAGACGGCATACGAGATttattagtagG | 1590 | CTACTAATAA | 1974 |
| 1_54 | TCTCGTGGGCTCGG | | | |
| EasySci-RNA_P7- | CAAGCAGAAGACGGCATACGAGATtgcgaagatc | 1591 | GATCTTCGCA | 1975 |
| 1_55 | GTCTCGTGGGCTCGG | | | |
| EasySci-RNA_P7- | CAAGCAGAAGACGGCATACGAGATaactacggct | 1592 | AGCCGTAGTT | 1976 |
| 1_56 | GTCTCGTGGGCTCGG | | | |
| EasySci-RNA_P7- | CAAGCAGAAGACGGCATACGAGATaacggaacgc | 1593 | GCGTTCCGTT | 1977 |
| 1_57 | GTCTCGTGGGCTCGG | | | |
| EasySci-RNA_P7- | CAAGCAGAAGACGGCATACGAGATgatgctacga | 1594 | TCGTAGCATC | 1978 |
| 1_58 | GTCTCGTGGGCTCGG | | | |
| EasySci-RNA_P7- | CAAGCAGAAGACGGCATACGAGATatctgccaat | 1595 | ATTGGCAGAT | 1979 |
| 1_59 | GTCTCGTGGGCTCGG | | | |
| EasySci-RNA_P7- | CAAGCAGAAGACGGCATACGAGATatcgtatcaa | 1596 | TTGATACGAT | 1980 |
| 1_60 | GTCTCGTGGGCTCGG | | | |
| EasySci-RNA_P7- | CAAGCAGAAGACGGCATACGAGATaacgcctcta | 1597 | TAGAGGCGTT | 1981 |
| 1_61 | GTCTCGTGGGCTCGG | | | |
| EasySci-RNA_P7- | CAAGCAGAAGACGGCATACGAGATacggcaacca | 1598 | TGGTTGCCGT | 1982 |
| 1_62 | GTCTCGTGGGCTCGG | | | |
| EasySci-RNA_P7- | CAAGCAGAAGACGGCATACGAGATcaggctaaga | 1599 | TCTTAGCCTG | 1983 |
| 1_63 | GTCTCGTGGGCTCGG | | | |
| EasySci-RNA_P7- | CAAGCAGAAGACGGCATACGAGATcgcaatatca | 1600 | TGATATTGCG | 1984 |
| 1_64 | GTCTCGTGGGCTCGG | | | |
| EasySci-RNA_P7- | CAAGCAGAAGACGGCATACGAGATttcgataacc | 1601 | GGTTATCGAA | 1985 |
| 1_65 | GTCTCGTGGGCTCGG | | | |
| EasySci-RNA_P7- | CAAGCAGAAGACGGCATACGAGATaacctcaaga | 1602 | TCTTGAGGTT | 1986 |
| 1_66 | GTCTCGTGGGCTCGG | | | |
| EasySci-RNA_P7- | CAAGCAGAAGACGGCATACGAGATcaggcgccat | 1603 | ATGGCGCCTG | 1987 |
| 1_67 | GTCTCGTGGGCTCGG | | | |
| EasySci-RNA_P7- | CAAGCAGAAGACGGCATACGAGATaactattataG | 1604 | TATAATAGTT | 1988 |
| 1_68 | TCTCGTGGGCTCGG | | | |
| EasySci-RNA_P7- | CAAGCAGAAGACGGCATACGAGATaagttaccta | 1605 | TAGGTAACTT | 1989 |
| 1_69 | GTCTCGTGGGCTCGG | | | |
| EasySci-RNA_P7- | CAAGCAGAAGACGGCATACGAGATcggcagagg | 1606 | TCCTCTGCCG | 1990 |
| 1_70 | aGTCTCGTGGGCTCGG | | | |
| EasySci-RNA_P7- | CAAGCAGAAGACGGCATACGAGATgcctcaataa | 1607 | TTATTGAGGC | 1991 |
| 1_71 | GTCTCGTGGGCTCGG | | | |
| EasySci-RNA_P7- | CAAGCAGAAGACGGCATACGAGATttaacgccgt | 1608 | ACGGCGTTAA | 1992 |
| 1_72 | GTCTCGTGGGCTCGG | | | |
| EasySci-RNA_P7- | CAAGCAGAAGACGGCATACGAGATcatacgatgc | 1609 | GCATCGTATG | 1993 |
| 1_73 | GTCTCGTGGGCTCGG | | | |
| EasySci-RNA_P7- | CAAGCAGAAGACGGCATACGAGATaagctgacct | 1610 | AGGTCAGCTT | 1994 |
| 1_74 | GTCTCGTGGGCTCGG | | | |
| EasySci-RNA_P7- | CAAGCAGAAGACGGCATACGAGATgagtccttatG | 1611 | ATAAGGACTC | 1995 |
| 1_75 | TCTCGTGGGCTCGG | | | |
| EasySci-RNA_P7- | CAAGCAGAAGACGGCATACGAGATcctacggcaa | 1612 | TTGCCGTAGG | 1996 |
| 1_76 | GTCTCGTGGGCTCGG | | | |
| EasySci-RNA_P7- | CAAGCAGAAGACGGCATACGAGATaatattcgaa | 1613 | TTCGAATATT | 1997 |
| 1_77 | GTCTCGTGGGCTCGG | | | |
| EasySci-RNA_P7- | CAAGCAGAAGACGGCATACGAGATttcaagaatc | 1614 | GATTCTTGAA | 1998 |
| 1_78 | GTCTCGTGGGCTCGG | | | |
| EasySci-RNA_P7- | CAAGCAGAAGACGGCATACGAGATatgctcgcaa | 1615 | TTGCGAGCAT | 1999 |
| 1_79 | GTCTCGTGGGCTCGG | | | |
| EasySci-RNA_P7- | CAAGCAGAAGACGGCATACGAGATggagtaagcc | 1616 | GGCTTACTCC | 2000 |
| 1_80 | GTCTCGTGGGCTCGG | | | |
| EasySci-RNA_P7- | CAAGCAGAAGACGGCATACGAGATttatcgtattG | 1617 | AATACGATAA | 2001 |
| 1_81 | TCTCGTGGGCTCGG | | | |
| EasySci-RNA_P7- | CAAGCAGAAGACGGCATACGAGATaagtctaata | 1618 | TATTAGACTT | 2002 |
| 1_82 | GTCTCGTGGGCTCGG | | | |
| EasySci-RNA_P7- | CAAGCAGAAGACGGCATACGAGATcggcttacta | 1619 | TAGTAAGCCG | 2003 |
| 1_83 | GTCTCGTGGGCTCGG | | | |
| EasySci-RNA_P7- | CAAGCAGAAGACGGCATACGAGATgatatggtct | 1620 | AGACCATATC | 2004 |
| 1_84 | GTCTCGTGGGCTCGG | | | |
| EasySci-RNA_P7- | CAAGCAGAAGACGGCATACGAGATtagtcgtcca | 1621 | TGGACGACTA | 2005 |
| 1_85 | GTCTCGTGGGCTCGG | | | |
| EasySci-RNA_P7- | CAAGCAGAAGACGGCATACGAGATtagctgctac | 1622 | GTAGCAGCTA | 2006 |
| 1_86 | GTCTCGTGGGCTCGG | | | |
| EasySci-RNA_P7- | CAAGCAGAAGACGGCATACGAGATctcttcaagc | 1623 | GCTTGAAGAG | 2007 |
| 1_87 | GTCTCGTGGGCTCGG | | | |
| EasySci-RNA_P7- | CAAGCAGAAGACGGCATACGAGATatgaacgcgc | 1624 | GCGCGTTCAT | 2008 |
| 1_88 | GTCTCGTGGGCTCGG | | | |
| EasySci-RNA_P7- | CAAGCAGAAGACGGCATACGAGATgtcgacggaa | 1625 | TTCCGTCGAC | 2009 |
| 1_89 | GTCTCGTGGGCTCGG | | | |
| EasySci-RNA_P7- | CAAGCAGAAGACGGCATACGAGATactaattgag | 1626 | CTCAATTAGT | 2010 |
| 1_90 | GTCTCGTGGGCTCGG | | | |
| EasySci-RNA_P7- | CAAGCAGAAGACGGCATACGAGATcttgcataatG | 1627 | ATTATGCAAG | 2011 |
| 1_91 | TCTCGTGGGCTCGG | | | |
| EasySci-RNA_P7- | CAAGCAGAAGACGGCATACGAGATtccttaccaa | 1628 | TTGGTAAGGA | 2012 |
| 1_92 | GTCTCGTGGGCTCGG | | | |
| EasySci-RNA_P7- | CAAGCAGAAGACGGCATACGAGATtgcagcctac | 1629 | GTAGGCTGCA | 2013 |
| 1_93 | GTCTCGTGGGCTCGG | | | |
| EasySci-RNA_P7- | CAAGCAGAAGACGGCATACGAGATggagctgagg | 1630 | CCTCAGCTCC | 2014 |
| 1_94 | GTCTCGTGGGCTCGG | | | |
| EasySci-RNA_P7- | CAAGCAGAAGACGGCATACGAGATgcagcggact | 1631 | AGTCCGCTGC | 2015 |
| 1_95 | GTCTCGTGGGCTCGG | | | |
| EasySci-RNA_P7- | CAAGCAGAAGACGGCATACGAGATcatcgcgctc | 1632 | GAGCGCGATG | 2016 |
| 1_96 | GTCTCGTGGGCTCGG | | | |
| EasySci-RNA_P7- | CAAGCAGAAGACGGCATACGAGATTTCTGGC | 1633 | TAGGCCAGAA | 2017 |
| 2_01 | CTAGTCTCGTGGGCTCGG | | | |
| EasySci-RNA_P7- | CAAGCAGAAGACGGCATACGAGATAATTGG | 1634 | ATCGCCAATT | 2018 |
| 2_02 | CGATGTCTCGTGGGCTCGG | | | |
| EasySci-RNA_P7- | CAAGCAGAAGACGGCATACGAGATAGGCAA | 1635 | GCGGTTGCCT | 2019 |
| 2_03 | CCGCGTCTCGTGGGCTCGG | | | |
| EasySci-RNA_P7- | CAAGCAGAAGACGGCATACGAGATACGCAA | 1636 | ATCATTGCGT | 2020 |
| 2_04 | TGATGTCTCGTGGGCTCGG | | | |
| EasySci-RNA_P7- | CAAGCAGAAGACGGCATACGAGATACTCGTT | 1637 | AGTAACGAGT | 2021 |
| 2_05 | ACTGTCTCGTGGGCTCGG | | | |
| EasySci-RNA_P7- | CAAGCAGAAGACGGCATACGAGATCAAGTC | 1638 | TGCTGACTTG | 2022 |
| 2_06 | AGCAGTCTCGTGGGCTCGG | | | |
| EasySci-RNA_P7- | CAAGCAGAAGACGGCATACGAGATGGTACG | 1639 | TATCCGTACC | 2023 |
| 2_07 | GATAGTCTCGTGGGCTCGG | | | |
| EasySci-RNA_P7- | CAAGCAGAAGACGGCATACGAGATCTCAAT | 1640 | GACCATTGAG | 2024 |
| 2_08 | GGTCGTCTCGTGGGCTCGG | | | |
| EasySci-RNA_P7- | CAAGCAGAAGACGGCATACGAGATACTCCG | 1641 | TCTTCGGAGT | 2025 |
| 2_09 | AAGAGTCTCGTGGGCTCGG | | | |
| EasySci-RNA_P7- | CAAGCAGAAGACGGCATACGAGATAATCCA | 1642 | GCCTTGGATT | 2026 |
| 2_10 | AGGCGTCTCGTGGGCTCGG | | | |
| EasySci-RNA_P7- | CAAGCAGAAGACGGCATACGAGATCGTCCA | 1643 | GCGATGGACG | 2027 |
| 2_11 | TCGCGTCTCGTGGGCTCGG | | | |
| EasySci-RNA_P7- | CAAGCAGAAGACGGCATACGAGATTTAGGT | 1644 | TCGTACCTAA | 2028 |
| 2_12 | ACGAGTCTCGTGGGCTCGG | | | |
| EasySci-RNA_P7- | CAAGCAGAAGACGGCATACGAGATCTTACC | 1645 | AGATGGTAAG | 2029 |
| 2_13 | ATCTGTCTCGTGGGCTCGG | | | |
| EasySci-RNA_P7- | CAAGCAGAAGACGGCATACGAGATCGAGAT | 1646 | TCTTATCTCG | 2030 |
| 2_14 | AAGAGTCTCGTGGGCTCGG | | | |
| EasySci-RNA_P7- | CAAGCAGAAGACGGCATACGAGATCGATCTT | 1647 | TAGAAGATCG | 2031 |
| 2_15 | CTAGTCTCGTGGGCTCGG | | | |
| EasySci-RNA_P7- | CAAGCAGAAGACGGCATACGAGATGTTCCG | 1648 | GGATCGGAAC | 2032 |
| 2_16 | ATCCGTCTCGTGGGCTCGG | | | |
| EasySci-RNA_P7- | CAAGCAGAAGACGGCATACGAGATGCCATA | 1649 | TTCTTATGGC | 2033 |
| 2_17 | AGAAGTCTCGTGGGCTCGG | | | |
| EasySci-RNA_P7- | CAAGCAGAAGACGGCATACGAGATAGATTC | 1650 | TTATGAATCT | 2034 |
| 2_18 | ATAAGTCTCGTGGGCTCGG | | | |
| EasySci-RNA_P7- | CAAGCAGAAGACGGCATACGAGATCAGAGC | 1651 | TGACGCTCTG | 2035 |
| 2_19 | GTCAGTCTCGTGGGCTCGG | | | |
| EasySci-RNA_P7- | CAAGCAGAAGACGGCATACGAGATGAGGAG | 1652 | CTGGCTCCTC | 2036 |
| 2_20 | CCAGGTCTCGTGGGCTCGG | | | |
| EasySci-RNA_P7- | CAAGCAGAAGACGGCATACGAGATATGAGG | 1653 | GGATCCTCAT | 2037 |
| 2_21 | ATCCGTCTCGTGGGCTCGG | | | |
| EasySci-RNA_P7- | CAAGCAGAAGACGGCATACGAGATCGGCGC | 1654 | TTGAGCGCCG | 2038 |
| 2_22 | TCAAGTCTCGTGGGCTCGG | | | |
| EasySci-RNA_P7- | CAAGCAGAAGACGGCATACGAGATCCTTAC | 1655 | TGACGTAAGG | 2039 |
| 2_23 | GTCAGTCTCGTGGGCTCGG | | | |
| EasySci-RNA_P7- | CAAGCAGAAGACGGCATACGAGATTTCTCAG | 1656 | TGACTGAGAA | 2040 |
| 2_24 | TCAGTCTCGTGGGCTCGG | | | |
| EasySci-RNA_P7- | CAAGCAGAAGACGGCATACGAGATATAGGA | 1657 | AAGCTCCTAT | 2041 |
| 2_25 | GCTTGTCTCGTGGGCTCGG | | | |
| EasySci-RNA_P7- | CAAGCAGAAGACGGCATACGAGATTAGCCG | 1658 | GAGTCGGCTA | 2042 |
| 2_26 | ACTCGTCTCGTGGGCTCGG | | | |
| EasySci-RNA_P7- | CAAGCAGAAGACGGCATACGAGATAAGAAC | 1659 | CGGAGTTCTT | 2043 |
| 2_27 | TCCGGTCTCGTGGGCTCGG | | | |
| EasySci-RNA_P7- | CAAGCAGAAGACGGCATACGAGATCTTGAG | 1660 | CGGTCTCAAG | 2044 |
| 2_28 | ACCGGTCTCGTGGGCTCGG | | | |
| EasySci-RNA_P7- | CAAGCAGAAGACGGCATACGAGATAACGCC | 1661 | GTATGGCGTT | 2045 |
| 2_29 | ATACGTCTCGTGGGCTCGG | | | |
| EasySci-RNA_P7- | CAAGCAGAAGACGGCATACGAGATCCTACTC | 1662 | GTTGAGTAGG | 2046 |
| 2_30 | AACGTCTCGTGGGCTCGG | | | |
| EasySci-RNA_P7- | CAAGCAGAAGACGGCATACGAGATTCTAGC | 1663 | GGAGGCTAGA | 2047 |
| 2_31 | CTCCGTCTCGTGGGCTCGG | | | |
| EasySci-RNA_P7- | CAAGCAGAAGACGGCATACGAGATCGCTTA | 1664 | GATCTAAGCG | 2048 |
| 2_32 | GATCGTCTCGTGGGCTCGG | | | |
| EasySci-RNA_P7- | CAAGCAGAAGACGGCATACGAGATGCTTAA | 1665 | ATGATTAAGC | 2049 |
| 2_33 | TCATGTCTCGTGGGCTCGG | | | |
| EasySci-RNA_P7- | CAAGCAGAAGACGGCATACGAGATAGCAGG | 1666 | TTGACCTGCT | 2050 |
| 2_34 | TCAAGTCTCGTGGGCTCGG | | | |
| EasySci-RNA_P7- | CAAGCAGAAGACGGCATACGAGATCCGCTT | 1667 | TTATAAGCGG | 2051 |
| 2_35 | ATAAGTCTCGTGGGCTCGG | | | |
| EasySci-RNA_P7- | CAAGCAGAAGACGGCATACGAGATCCTAAT | 1668 | TTCCATTAGG | 2052 |
| 2_36 | GGAAGTCTCGTGGGCTCGG | | | |
| EasySci-RNA_P7- | CAAGCAGAAGACGGCATACGAGATCATTGG | 1669 | GGAACCAATG | 2053 |
| 2_37 | TTCCGTCTCGTGGGCTCGG | | | |
| EasySci-RNA_P7- | CAAGCAGAAGACGGCATACGAGATACCAGT | 1670 | AATAACTGGT | 2054 |
| 2_38 | TATTGTCTCGTGGGCTCGG | | | |
| EasySci-RNA_P7- | CAAGCAGAAGACGGCATACGAGATGACTCG | 1671 | TAAGCGAGTC | 2055 |
| 2_39 | CTTAGTCTCGTGGGCTCGG | | | |
| EasySci-RNA_P7- | CAAGCAGAAGACGGCATACGAGATAATTGC | 1672 | CGGAGCAATT | 2056 |
| 2_40 | TCCGGTCTCGTGGGCTCGG | | | |
| EasySci-RNA_P7- | CAAGCAGAAGACGGCATACGAGATTGCGAA | 1673 | GGCATTCGCA | 2057 |
| 2_41 | TGCCGTCTCGTGGGCTCGG | | | |
| EasySci-RNA_P7- | CAAGCAGAAGACGGCATACGAGATTGCCTCC | 1674 | GCTGGAGGCA | 2058 |
| 2_42 | AGCGTCTCGTGGGCTCGG | | | |
| EasySci-RNA_P7- | CAAGCAGAAGACGGCATACGAGATTTAGGC | 1675 | TCAAGCCTAA | 2059 |
| 2_43 | TTGAGTCTCGTGGGCTCGG | | | |
| EasySci-RNA_P7- | CAAGCAGAAGACGGCATACGAGATACTCTG | 1676 | AGCTCAGAGT | 2060 |
| 2_44 | AGCTGTCTCGTGGGCTCGG | | | |
| EasySci-RNA_P7- | CAAGCAGAAGACGGCATACGAGATTTCGAA | 1677 | GTCGTTCGAA | 2061 |
| 2_45 | CGACGTCTCGTGGGCTCGG | | | |
| EasySci-RNA_P7- | CAAGCAGAAGACGGCATACGAGATTACTGCT | 1678 | CCGAGCAGTA | 2062 |
| 2_46 | CGGGTCTCGTGGGCTCGG | | | |
| EasySci-RNA_P7- | CAAGCAGAAGACGGCATACGAGATTCTAGA | 1679 | GTCTTCTAGA | 2063 |
| 2_47 | AGACGTCTCGTGGGCTCGG | | | |
| EasySci-RNA_P7- | CAAGCAGAAGACGGCATACGAGATTATTGG | 1680 | TATTCCAATA | 2064 |
| 2_48 | AATAGTCTCGTGGGCTCGG | | | |
| EasySci-RNA_P7- | CAAGCAGAAGACGGCATACGAGATAAGATA | 1681 | TTGATATCTT | 2065 |
| 2_49 | TCAAGTCTCGTGGGCTCGG | | | |
| EasySci-RNA_P7- | CAAGCAGAAGACGGCATACGAGATAGTCCA | 1682 | ACCATGGACT | 2066 |
| 2_50 | TGGTGTCTCGTGGGCTCGG | | | |
| EasySci-RNA_P7- | CAAGCAGAAGACGGCATACGAGATGGTTGA | 1683 | GTATTCAACC | 2067 |
| 2_51 | ATACGTCTCGTGGGCTCGG | | | |
| EasySci-RNA_P7- | CAAGCAGAAGACGGCATACGAGATCTAGCG | 1684 | CCATCGCTAG | 2068 |
| 2_52 | ATGGGTCTCGTGGGCTCGG | | | |
| EasySci-RNA_P7- | CAAGCAGAAGACGGCATACGAGATCCAATA | 1685 | GGCGTATTGG | 2069 |
| 2_53 | CGCCGTCTCGTGGGCTCGG | | | |
| EasySci-RNA_P7- | CAAGCAGAAGACGGCATACGAGATGAGATA | 1686 | GAGGTATCTC | 2070 |
| 2_54 | CCTCGTCTCGTGGGCTCGG | | | |
| EasySci-RNA_P7- | CAAGCAGAAGACGGCATACGAGATGCTCAG | 1687 | GCTCCTGAGC | 2071 |
| 2_55 | GAGCGTCTCGTGGGCTCGG | | | |
| EasySci-RNA_P7- | CAAGCAGAAGACGGCATACGAGATACTAGT | 1688 | TGCAACTAGT | 2072 |
| 2_56 | TGCAGTCTCGTGGGCTCGG | | | |
| EasySci-RNA_P7- | CAAGCAGAAGACGGCATACGAGATCCGCTA | 1689 | TGGATAGCGG | 2073 |
| 2_57 | TCCAGTCTCGTGGGCTCGG | | | |
| EasySci-RNA_P7- | CAAGCAGAAGACGGCATACGAGATATGCAA | 1690 | TAAGTTGCAT | 2074 |
| 2_58 | CTTAGTCTCGTGGGCTCGG | | | |
| EasySci-RNA_P7- | CAAGCAGAAGACGGCATACGAGATAGGACC | 1691 | ACTTGGTCCT | 2075 |
| 2_59 | AAGTGTCTCGTGGGCTCGG | | | |
| EasySci-RNA_P7- | CAAGCAGAAGACGGCATACGAGATGGCGTC | 1692 | TGAGGACGCC | 2076 |
| 2_60 | CTCAGTCTCGTGGGCTCGG | | | |
| EasySci-RNA_P7- | CAAGCAGAAGACGGCATACGAGATGGAAGC | 1693 | GCGAGCTTCC | 2077 |
| 2_61 | TCGCGTCTCGTGGGCTCGG | | | |
| EasySci-RNA_P7- | CAAGCAGAAGACGGCATACGAGATAATCGT | 1694 | TATAACGATT | 2078 |
| 2_62 | TATAGTCTCGTGGGCTCGG | | | |
| EasySci-RNA_P7- | CAAGCAGAAGACGGCATACGAGATCCGAGA | 1695 | CCTCTCTCGG | 2079 |
| 2_63 | GAGGGTCTCGTGGGCTCGG | | | |
| EasySci-RNA_P7- | CAAGCAGAAGACGGCATACGAGATGAGGAA | 1696 | TGAGTTCCTC | 2080 |
| 2_64 | CTCAGTCTCGTGGGCTCGG | | | |
| EasySci-RNA_P7- | CAAGCAGAAGACGGCATACGAGATGGTCTG | 1697 | TGCTCAGACC | 2081 |
| 2_65 | AGCAGTCTCGTGGGCTCGG | | | |
| EasySci-RNA_P7- | CAAGCAGAAGACGGCATACGAGATACCATT | 1698 | GCTTAATGGT | 2082 |
| 2_66 | AAGCGTCTCGTGGGCTCGG | | | |
| EasySci-RNA_P7- | CAAGCAGAAGACGGCATACGAGATAACTCT | 1699 | TGGTAGAGTT | 2083 |
| 2_67 | ACCAGTCTCGTGGGCTCGG | | | |
| EasySci-RNA_P7- | CAAGCAGAAGACGGCATACGAGATTGCTCA | 1700 | GAGTTGAGCA | 2084 |
| 2_68 | ACTCGTCTCGTGGGCTCGG | | | |
| EasySci-RNA_P7- | CAAGCAGAAGACGGCATACGAGATCCGGCA | 1701 | AGGCTGCCGG | 2085 |
| 2_69 | GCCTGTCTCGTGGGCTCGG | | | |
| EasySci-RNA_P7- | CAAGCAGAAGACGGCATACGAGATCTCGCG | 1702 | TGGTCGCGAG | 2086 |
| 2_70 | ACCAGTCTCGTGGGCTCGG | | | |
| EasySci-RNA_P7- | CAAGCAGAAGACGGCATACGAGATTGGACC | 1703 | CTAAGGTCCA | 2087 |
| 2_71 | TTAGGTCTCGTGGGCTCGG | | | |
| EasySci-RNA_P7- | CAAGCAGAAGACGGCATACGAGATGGAATG | 1704 | CGGTCATTCC | 2088 |
| 2_72 | ACCGGTCTCGTGGGCTCGG | | | |
| EasySci-RNA_P7- | CAAGCAGAAGACGGCATACGAGATCAGTAT | 1705 | CATCATACTG | 2089 |
| 2_73 | GATGGTCTCGTGGGCTCGG | | | |
| EasySci-RNA_P7- | CAAGCAGAAGACGGCATACGAGATCTCATG | 1706 | TATTCATGAG | 2090 |
| 2_74 | AATAGTCTCGTGGGCTCGG | | | |
| EasySci-RNA_P7- | CAAGCAGAAGACGGCATACGAGATCTGCGT | 1707 | TACTACGCAG | 2091 |
| 2_75 | AGTAGTCTCGTGGGCTCGG | | | |
| EasySci-RNA_P7- | CAAGCAGAAGACGGCATACGAGATGGAGCA | 1708 | AGGTTGCTCC | 2092 |
| 2_76 | ACCTGTCTCGTGGGCTCGG | | | |
| EasySci-RNA_P7- | CAAGCAGAAGACGGCATACGAGATTCAGTA | 1709 | GTATTACTGA | 2093 |
| 2_77 | ATACGTCTCGTGGGCTCGG | | | |
| EasySci-RNA_P7- | CAAGCAGAAGACGGCATACGAGATGACGCT | 1710 | ATGCAGCGTC | 2094 |
| 2_78 | GCATGTCTCGTGGGCTCGG | | | |
| EasySci-RNA_P7- | CAAGCAGAAGACGGCATACGAGATATCTCC | 1711 | AGCTGGAGAT | 2095 |
| 2_79 | AGCTGTCTCGTGGGCTCGG | | | |
| EasySci-RNA_P7- | CAAGCAGAAGACGGCATACGAGATTTAGAA | 1712 | GCAGTTCTAA | 2096 |
| 2_80 | CTGCGTCTCGTGGGCTCGG | | | |
| EasySci-RNA_P7- | CAAGCAGAAGACGGCATACGAGATCCGTAA | 1713 | GGCGTTACGG | 2097 |
| 2_81 | CGCCGTCTCGTGGGCTCGG | | | |
| EasySci-RNA_P7- | CAAGCAGAAGACGGCATACGAGATGACTAT | 1714 | AGGTATAGTC | 2098 |
| 2_82 | ACCTGTCTCGTGGGCTCGG | | | |
| EasySci-RNA_P7- | CAAGCAGAAGACGGCATACGAGATTGCGAG | 1715 | ACCTCTCGCA | 2099 |
| 2_83 | AGGTGTCTCGTGGGCTCGG | | | |
| EasySci-RNA_P7- | CAAGCAGAAGACGGCATACGAGATATAGGC | 1716 | TGAGGCCTAT | 2100 |
| 2_84 | CTCAGTCTCGTGGGCTCGG | | | |
| EasySci-RNA_P7- | CAAGCAGAAGACGGCATACGAGATTCAATTC | 1717 | GTTGAATTGA | 2101 |
| 2_85 | AACGTCTCGTGGGCTCGG | | | |
| EasySci-RNA_P7- | CAAGCAGAAGACGGCATACGAGATGGCTAC | 1718 | CCAGGTAGCC | 2102 |
| 2_86 | CTGGGTCTCGTGGGCTCGG | | | |
| EasySci-RNA_P7- | CAAGCAGAAGACGGCATACGAGATCTTCTTG | 1719 | GTTCAAGAAG | 2103 |
| 2_87 | AACGTCTCGTGGGCTCGG | | | |
| EasySci-RNA_P7- | CAAGCAGAAGACGGCATACGAGATTTACGC | 1720 | TGCTGCGTAA | 2104 |
| 2_88 | AGCAGTCTCGTGGGCTCGG | | | |
| EasySci-RNA_P7- | CAAGCAGAAGACGGCATACGAGATATAACC | 1721 | TGGCGGTTAT | 2105 |
| 2_89 | GCCAGTCTCGTGGGCTCGG | | | |
| EasySci-RNA_P7- | CAAGCAGAAGACGGCATACGAGATCCAGTC | 1722 | ATTCGACTGG | 2106 |
| 2_90 | GAATGTCTCGTGGGCTCGG | | | |
| EasySci-RNA_P7- | CAAGCAGAAGACGGCATACGAGATTAACCA | 1723 | TAGTTGGTTA | 2107 |
| 2_91 | ACTAGTCTCGTGGGCTCGG | | | |
| EasySci-RNA_P7- | CAAGCAGAAGACGGCATACGAGATTAGCTG | 1724 | TCGCCAGCTA | 2108 |
| 2_92 | GCGAGTCTCGTGGGCTCGG | | | |
| EasySci-RNA_P7- | CAAGCAGAAGACGGCATACGAGATCAATGA | 1725 | CAAGTCATTG | 2109 |
| 2_93 | CTTGGTCTCGTGGGCTCGG | | | |
| EasySci-RNA_P7- | CAAGCAGAAGACGGCATACGAGATCTCTGC | 1726 | GATCGCAGAG | 2110 |
| 2_94 | GATCGTCTCGTGGGCTCGG | | | |
| EasySci-RNA_P7- | CAAGCAGAAGACGGCATACGAGATGCATAC | 1727 | ATTGGTATGC | 2111 |
| 2_95 | CAATGTCTCGTGGGCTCGG | | | |
| EasySci-RNA_P7- | CAAGCAGAAGACGGCATACGAGATACCTGA | 1728 | CCTATCAGGT | 2112 |
| 2_96 | TAGGGTCTCGTGGGCTCGG | | | |
| EasySci-RNA_P7- | CAAGCAGAAGACGGCATACGAGATATGGTT | 1729 | CGGTAACCAT | 2113 |
| 3_01 | ACCGGTCTCGTGGGCTCGG | | | |
| EasySci-RNA_P7- | CAAGCAGAAGACGGCATACGAGATCTTAGG | 1730 | ATAACCTAAG | 2114 |
| 3_02 | TTATGTCTCGTGGGCTCGG | | | |
| EasySci-RNA_P7- | CAAGCAGAAGACGGCATACGAGATCGCCTT | 1731 | GGCTAAGGCG | 2115 |
| 3_03 | AGCCGTCTCGTGGGCTCGG | | | |
| EasySci-RNA_P7- | CAAGCAGAAGACGGCATACGAGATACGTAA | 1732 | TACGTTACGT | 2116 |
| 3_04 | CGTAGTCTCGTGGGCTCGG | | | |
| EasySci-RNA_P7- | CAAGCAGAAGACGGCATACGAGATTTATTCT | 1733 | TAGAGAATAA | 2117 |
| 3_05 | CTAGTCTCGTGGGCTCGG | | | |
| EasySci-RNA_P7- | CAAGCAGAAGACGGCATACGAGATGCATAG | 1734 | TATACTATGC | 2118 |
| 3_06 | TATAGTCTCGTGGGCTCGG | | | |
| EasySci-RNA_P7- | CAAGCAGAAGACGGCATACGAGATCATGCG | 1735 | TATGCGCATG | 2119 |
| 3_07 | CATAGTCTCGTGGGCTCGG | | | |
| EasySci-RNA_P7- | CAAGCAGAAGACGGCATACGAGATGTACCA | 1736 | GAATTGGTAC | 2120 |
| 3_08 | ATTCGTCTCGTGGGCTCGG | | | |
| EasySci-RNA_P7- | CAAGCAGAAGACGGCATACGAGATAACGAG | 1737 | TGATCTCGTT | 2121 |
| 3_09 | ATCAGTCTCGTGGGCTCGG | | | |
| EasySci-RNA_P7- | CAAGCAGAAGACGGCATACGAGATTCTCGAT | 1738 | TTAATCGAGA | 2122 |
| 3_10 | TAAGTCTCGTGGGCTCGG | | | |
| EasySci-RNA_P7- | CAAGCAGAAGACGGCATACGAGATCGTCGA | 1739 | CCGGTCGACG | 2123 |
| 3_11 | CCGGGTCTCGTGGGCTCGG | | | |
| EasySci-RNA_P7- | CAAGCAGAAGACGGCATACGAGATGTTGAT | 1740 | AGCTATCAAC | 2124 |
| 3_12 | AGCTGTCTCGTGGGCTCGG | | | |
| EasySci-RNA_P7- | CAAGCAGAAGACGGCATACGAGATCAGCGT | 1741 | ACCAACGCTG | 2125 |
| 3_13 | TGGTGTCTCGTGGGCTCGG | | | |
| EasySci-RNA_P7- | CAAGCAGAAGACGGCATACGAGATATCGGC | 1742 | CAATGCCGAT | 2126 |
| 3_14 | ATTGGTCTCGTGGGCTCGG | | | |
| EasySci-RNA_P7- | CAAGCAGAAGACGGCATACGAGATGGTAGT | 1743 | TAGGACTACC | 2127 |
| 3_15 | CCTAGTCTCGTGGGCTCGG | | | |
| EasySci-RNA_P7- | CAAGCAGAAGACGGCATACGAGATTAGCAT | 1744 | CGCGATGCTA | 2128 |
| 3_16 | CGCGGTCTCGTGGGCTCGG | | | |
| EasySci-RNA_P7- | CAAGCAGAAGACGGCATACGAGATACTGGT | 1745 | GGTTACCAGT | 2129 |
| 3_17 | AACCGTCTCGTGGGCTCGG | | | |
| EasySci-RNA_P7- | CAAGCAGAAGACGGCATACGAGATTCTACTG | 1746 | GGTCAGTAGA | 2130 |
| 3_18 | ACCGTCTCGTGGGCTCGG | | | |
| EasySci-RNA_P7- | CAAGCAGAAGACGGCATACGAGATCAAGAG | 1747 | ATAACTCTTG | 2131 |
| 3_19 | TTATGTCTCGTGGGCTCGG | | | |
| EasySci-RNA_P7- | CAAGCAGAAGACGGCATACGAGATCAATTA | 1748 | TTCCTAATTG | 2132 |
| 3_20 | GGAAGTCTCGTGGGCTCGG | | | |
| EasySci-RNA_P7- | CAAGCAGAAGACGGCATACGAGATTTGCGG | 1749 | GGTTCCGCAA | 2133 |
| 3_21 | AACCGTCTCGTGGGCTCGG | | | |
| EasySci-RNA_P7- | CAAGCAGAAGACGGCATACGAGATAGCCGA | 1750 | TACTTCGGCT | 2134 |
| 3_22 | AGTAGTCTCGTGGGCTCGG | | | |
| EasySci-RNA_P7- | CAAGCAGAAGACGGCATACGAGATGGTCCG | 1751 | CGTACGGACC | 2135 |
| 3_23 | TACGGTCTCGTGGGCTCGG | | | |
| EasySci-RNA_P7- | CAAGCAGAAGACGGCATACGAGATAGCATG | 1752 | CTTGCATGCT | 2136 |
| 3_24 | CAAGGTCTCGTGGGCTCGG | | | |
| EasySci-RNA_P7- | CAAGCAGAAGACGGCATACGAGATTCTTCGT | 1753 | GCAACGAAGA | 2137 |
| 3_25 | TGCGTCTCGTGGGCTCGG | | | |
| EasySci-RNA_P7- | CAAGCAGAAGACGGCATACGAGATGTTGGA | 1754 | TTCTTCCAAC | 2138 |
| 3_26 | AGAAGTCTCGTGGGCTCGG | | | |
| EasySci-RNA_P7- | CAAGCAGAAGACGGCATACGAGATGGAATA | 1755 | TCCGTATTCC | 2139 |
| 3_27 | CGGAGTCTCGTGGGCTCGG | | | |
| EasySci-RNA_P7- | CAAGCAGAAGACGGCATACGAGATACCGAC | 1756 | TACCGTCGGT | 2140 |
| 3_28 | GGTAGTCTCGTGGGCTCGG | | | |
| EasySci-RNA_P7- | CAAGCAGAAGACGGCATACGAGATATACTT | 1757 | AATCAAGTAT | 2141 |
| 3_29 | GATTGTCTCGTGGGCTCGG | | | |
| EasySci-RNA_P7- | CAAGCAGAAGACGGCATACGAGATGTCGTTC | 1758 | GGCGAACGAC | 2142 |
| 3_30 | GCCGTCTCGTGGGCTCGG | | | |
| EasySci-RNA_P7- | CAAGCAGAAGACGGCATACGAGATAATGAT | 1759 | TGCAATCATT | 2143 |
| 3_31 | TGCAGTCTCGTGGGCTCGG | | | |
| EasySci-RNA_P7- | CAAGCAGAAGACGGCATACGAGATCCATTA | 1760 | CTGCTAATGG | 2144 |
| 3_32 | GCAGGTCTCGTGGGCTCGG | | | |
| EasySci-RNA_P7- | CAAGCAGAAGACGGCATACGAGATCTGACT | 1761 | CATTAGTCAG | 2145 |
| 3_33 | AATGGTCTCGTGGGCTCGG | | | |
| EasySci-RNA_P7- | CAAGCAGAAGACGGCATACGAGATCCTTAC | 1762 | GTCCGTAAGG | 2146 |
| 3_34 | GGACGTCTCGTGGGCTCGG | | | |
| EasySci-RNA_P7- | CAAGCAGAAGACGGCATACGAGATCGCATA | 1763 | TAGTTATGCG | 2147 |
| 3_35 | ACTAGTCTCGTGGGCTCGG | | | |
| EasySci-RNA_P7- | CAAGCAGAAGACGGCATACGAGATAACCGG | 1764 | TCCTCCGGTT | 2148 |
| 3_36 | AGGAGTCTCGTGGGCTCGG | | | |
| EasySci-RNA_P7- | CAAGCAGAAGACGGCATACGAGATAATGCA | 1765 | CCGCTGCATT | 2149 |
| 3_37 | GCGGGTCTCGTGGGCTCGG | | | |
| EasySci-RNA_P7- | CAAGCAGAAGACGGCATACGAGATCAGTCG | 1766 | TTGCCGACTG | 2150 |
| 3_38 | GCAAGTCTCGTGGGCTCGG | | | |
| EasySci-RNA_P7- | CAAGCAGAAGACGGCATACGAGATATAGAA | 1767 | TGGATTCTAT | 2151 |
| 3_39 | TCCAGTCTCGTGGGCTCGG | | | |
| EasySci-RNA_P7- | CAAGCAGAAGACGGCATACGAGATTCTCAG | 1768 | ATATCTGAGA | 2152 |
| 3_40 | ATATGTCTCGTGGGCTCGG | | | |
| EasySci-RNA_P7- | CAAGCAGAAGACGGCATACGAGATACGAAG | 1769 | AATACTICGT | 2153 |
| 3_41 | TATTGTCTCGTGGGCTCGG | | | |
| EasySci-RNA_P7- | CAAGCAGAAGACGGCATACGAGATAGACTT | 1770 | TGATAAGTCT | 2154 |
| 3_42 | ATCAGTCTCGTGGGCTCGG | | | |
| EasySci-RNA_P7- | CAAGCAGAAGACGGCATACGAGATTCGCGC | 1771 | TACGGCGCGA | 2155 |
| 3_43 | CGTAGTCTCGTGGGCTCGG | | | |
| EasySci-RNA_P7- | CAAGCAGAAGACGGCATACGAGATAGCTTG | 1772 | TCTTCAAGCT | 2156 |
| 3_44 | AAGAGTCTCGTGGGCTCGG | | | |
| EasySci-RNA_P7- | CAAGCAGAAGACGGCATACGAGATCGGTAG | 1773 | GTAGCTACCG | 2157 |
| 3_45 | CTACGTCTCGTGGGCTCGG | | | |
| EasySci-RNA_P7- | CAAGCAGAAGACGGCATACGAGATGCGGCA | 1774 | CGCATGCCGC | 2158 |
| 3_46 | TGCGGTCTCGTGGGCTCGG | | | |
| EasySci-RNA_P7- | CAAGCAGAAGACGGCATACGAGATAAGACT | 1775 | AGCCAGTCTT | 2159 |
| 3_47 | GGCTGTCTCGTGGGCTCGG | | | |
| EasySci-RNA_P7- | CAAGCAGAAGACGGCATACGAGATCGCATT | 1776 | TAAGAATGCG | 2160 |
| 3_48 | CTTAGTCTCGTGGGCTCGG | | | |
| EasySci-RNA_P7- | CAAGCAGAAGACGGCATACGAGATTACCGT | 1777 | GGAGACGGTA | 2161 |
| 3_49 | CTCCGTCTCGTGGGCTCGG | | | |
| EasySci-RNA_P7- | CAAGCAGAAGACGGCATACGAGATAATATA | 1778 | ATACTATATT | 2162 |
| 3_50 | GTATGTCTCGTGGGCTCGG | | | |
| EasySci-RNA_P7- | CAAGCAGAAGACGGCATACGAGATATCATA | 1779 | ATCTTATGAT | 2163 |
| 3_51 | AGATGTCTCGTGGGCTCGG | | | |
| EasySci-RNA_P7- | CAAGCAGAAGACGGCATACGAGATATCAAT | 1780 | GGATATTGAT | 2164 |
| 3_52 | ATCCGTCTCGTGGGCTCGG | | | |
| EasySci-RNA_P7- | CAAGCAGAAGACGGCATACGAGATTATTACC | 1781 | GTTGGTAATA | 2165 |
| 3_53 | AACGTCTCGTGGGCTCGG | | | |
| EasySci-RNA_P7- | CAAGCAGAAGACGGCATACGAGATGAGAAG | 1782 | TGGTCTTCTC | 2166 |
| 3_54 | ACCAGTCTCGTGGGCTCGG | | | |
| EasySci-RNA_P7- | CAAGCAGAAGACGGCATACGAGATTGGCGC | 1783 | GAGAGCGCCA | 2167 |
| 3_55 | TCTCGTCTCGTGGGCTCGG | | | |
| EasySci-RNA_P7- | CAAGCAGAAGACGGCATACGAGATGCGACG | 1784 | TTATCGTCGC | 2168 |
| 3_56 | ATAAGTCTCGTGGGCTCGG | | | |
| EasySci-RNA_P7- | CAAGCAGAAGACGGCATACGAGATAACGTC | 1785 | TCGCGACGTT | 2169 |
| 3_57 | GCGAGTCTCGTGGGCTCGG | | | |
| EasySci-RNA_P7- | CAAGCAGAAGACGGCATACGAGATATGAAG | 1786 | GAAGCTTCAT | 2170 |
| 3_58 | CTTCGTCTCGTGGGCTCGG | | | |
| EasySci-RNA_P7- | CAAGCAGAAGACGGCATACGAGATGCCATA | 1787 | ACTCTATGGC | 2171 |
| 3_59 | GAGTGTCTCGTGGGCTCGG | | | |
| EasySci-RNA_P7- | CAAGCAGAAGACGGCATACGAGATTGACTG | 1788 | TTCTCAGTCA | 2172 |
| 3_60 | AGAAGTCTCGTGGGCTCGG | | | |
| EasySci-RNA_P7- | CAAGCAGAAGACGGCATACGAGATCGGCTC | 1789 | TTCGGAGCCG | 2173 |
| 3_61 | CGAAGTCTCGTGGGCTCGG | | | |
| EasySci-RNA_P7- | CAAGCAGAAGACGGCATACGAGATCAGCCA | 1790 | CAATTGGCTG | 2174 |
| 3_62 | ATTGGTCTCGTGGGCTCGG | | | |
| EasySci-RNA_P7- | CAAGCAGAAGACGGCATACGAGATGCGACC | 1791 | AACTGGTCGC | 2175 |
| 3_63 | AGTTGTCTCGTGGGCTCGG | | | |
| EasySci-RNA_P7- | CAAGCAGAAGACGGCATACGAGATCCTAAC | 1792 | CGTCGTTAGG | 2176 |
| 3_64 | GACGGTCTCGTGGGCTCGG | | | |
| EasySci-RNA_P7- | CAAGCAGAAGACGGCATACGAGATCTTCGC | 1793 | GATTGCGAAG | 2177 |
| 3_65 | AATCGTCTCGTGGGCTCGG | | | |
| EasySci-RNA_P7- | CAAGCAGAAGACGGCATACGAGATTGACTC | 1794 | AACGGAGTCA | 2178 |
| 3_66 | CGTTGTCTCGTGGGCTCGG | | | |
| EasySci-RNA_P7- | CAAGCAGAAGACGGCATACGAGATGATAGT | 1795 | AGCGACTATC | 2179 |
| 3_67 | CGCTGTCTCGTGGGCTCGG | | | |
| EasySci-RNA_P7- | CAAGCAGAAGACGGCATACGAGATAAGGTA | 1796 | TTAGTACCTT | 2180 |
| 3_68 | CTAAGTCTCGTGGGCTCGG | | | |
| EasySci-RNA_P7- | CAAGCAGAAGACGGCATACGAGATTTGCAT | 1797 | CCTCATGCAA | 2181 |
| 3_69 | GAGGGTCTCGTGGGCTCGG | | | |
| EasySci-RNA_P7- | CAAGCAGAAGACGGCATACGAGATGTATTAT | 1798 | TATATAATAC | 2182 |
| 3_70 | ATAGTCTCGTGGGCTCGG | | | |
| EasySci-RNA_P7- | CAAGCAGAAGACGGCATACGAGATATTCTTG | 1799 | AGCCAAGAAT | 2183 |
| 3_71 | GCTGTCTCGTGGGCTCGG | | | |
| EasySci-RNA_P7- | CAAGCAGAAGACGGCATACGAGATTGCATCT | 1800 | CCAAGATGCA | 2184 |
| 3_72 | TGGGTCTCGTGGGCTCGG | | | |
| EasySci-RNA_P7- | CAAGCAGAAGACGGCATACGAGATGTTGGC | 1801 | TTGAGCCAAC | 2185 |
| 3_73 | TCAAGTCTCGTGGGCTCGG | | | |
| EasySci-RNA_P7- | CAAGCAGAAGACGGCATACGAGATAATATC | 1802 | TAATGATATT | 2186 |
| 3_74 | ATTAGTCTCGTGGGCTCGG | | | |
| EasySci-RNA_P7- | CAAGCAGAAGACGGCATACGAGATTAACTA | 1803 | GACTTAGTTA | 2187 |
| 3_75 | AGTCGTCTCGTGGGCTCGG | | | |
| EasySci-RNA_P7- | CAAGCAGAAGACGGCATACGAGATCAATAA | 1804 | TTGGTTATTG | 2188 |
| 3_76 | CCAAGTCTCGTGGGCTCGG | | | |
| EasySci-RNA_P7- | CAAGCAGAAGACGGCATACGAGATTTATACT | 1805 | TGCAGTATAA | 2189 |
| 3_77 | GCAGTCTCGTGGGCTCGG | | | |
| EasySci-RNA_P7- | CAAGCAGAAGACGGCATACGAGATTGAGCA | 1806 | GCTCTGCTCA | 2190 |
| 3_78 | GAGCGTCTCGTGGGCTCGG | | | |
| EasySci-RNA_P7- | CAAGCAGAAGACGGCATACGAGATTGCAAG | 1807 | TTGGCTTGCA | 2191 |
| 3_79 | CCAAGTCTCGTGGGCTCGG | | | |
| EasySci-RNA_P7- | CAAGCAGAAGACGGCATACGAGATTGGAGA | 1808 | TCGTTCTCCA | 2192 |
| 3_80 | ACGAGTCTCGTGGGCTCGG | | | |
| EasySci-RNA_P7- | CAAGCAGAAGACGGCATACGAGATATCGGA | 1809 | TGAATCCGAT | 2193 |
| 3_81 | TTCAGTCTCGTGGGCTCGG | | | |
| EasySci-RNA_P7- | CAAGCAGAAGACGGCATACGAGATACTAGA | 1810 | TCGGTCTAGT | 2194 |
| 3_82 | CCGAGTCTCGTGGGCTCGG | | | |
| EasySci-RNA_P7- | CAAGCAGAAGACGGCATACGAGATCGAGAT | 1811 | AAGCATCTCG | 2195 |
| 3_83 | GCTTGTCTCGTGGGCTCGG | | | |
| EasySci-RNA_P7- | CAAGCAGAAGACGGCATACGAGATTTCTATT | 1812 | ATTAATAGAA | 2196 |
| 3_84 | AATGTCTCGTGGGCTCGG | | | |
| EasySci-RNA_P7- | CAAGCAGAAGACGGCATACGAGATAATTAG | 1813 | TGGACTAATT | 2197 |
| 3_85 | TCCAGTCTCGTGGGCTCGG | | | |
| EasySci-RNA_P7- | CAAGCAGAAGACGGCATACGAGATGCTCCA | 1814 | GGCTTGGAGC | 2198 |
| 3_86 | AGCCGTCTCGTGGGCTCGG | | | |
| EasySci-RNA_P7- | CAAGCAGAAGACGGCATACGAGATCTCTTCC | 1815 | TTAGGAAGAG | 2199 |
| 3_87 | TAAGTCTCGTGGGCTCGG | | | |
| EasySci-RNA_P7- | CAAGCAGAAGACGGCATACGAGATCCGCGT | 1816 | GTTAACGCGG | 2200 |
| 3_88 | TAACGTCTCGTGGGCTCGG | | | |
| EasySci-RNA_P7- | CAAGCAGAAGACGGCATACGAGATGACGGA | 1817 | CTATTCCGTC | 2201 |
| 3_89 | ATAGGTCTCGTGGGCTCGG | | | |
| EasySci-RNA_P7- | CAAGCAGAAGACGGCATACGAGATCTCAGA | 1818 | CAACTCTGAG | 2202 |
| 3_90 | GTTGGTCTCGTGGGCTCGG | | | |
| EasySci-RNA_P7- | CAAGCAGAAGACGGCATACGAGATGGACGT | 1819 | TCATACGTCC | 2203 |
| 3_91 | ATGAGTCTCGTGGGCTCGG | | | |
| EasySci-RNA_P7- | CAAGCAGAAGACGGCATACGAGATAAGATG | 1820 | GACTCATCTT | 2204 |
| 3_92 | AGTCGTCTCGTGGGCTCGG | | | |
| EasySci-RNA_P7- | CAAGCAGAAGACGGCATACGAGATATGCGC | 1821 | GGTAGCGCAT | 2205 |
| 3_93 | TACCGTCTCGTGGGCTCGG | | | |
| EasySci-RNA_P7- | CAAGCAGAAGACGGCATACGAGATGGACGC | 1822 | TTAGGCGTCC | 2206 |
| 3_94 | CTAAGTCTCGTGGGCTCGG | | | |
| EasySci-RNA_P7- | CAAGCAGAAGACGGCATACGAGATCAGTTA | 1823 | GGTCTAACTG | 2207 |
| 3_95 | GACCGTCTCGTGGGCTCGG | | | |
| EasySci-RNA_P7- | CAAGCAGAAGACGGCATACGAGATCCGTCTC | 1824 | ATTGAGACGG | 2208 |
| 3_96 | AATGTCTCGTGGGCTCGG | | | |
| EasySci-RNA_P7- | CAAGCAGAAGACGGCATACGAGATATGGTA | 1825 | AACGTACCAT | 2209 |
| 4_01 | CGTTGTCTCGTGGGCTCGG | | | |
| EasySci-RNA_P7- | CAAGCAGAAGACGGCATACGAGATGTAACT | 1826 | GTTCAGTTAC | 2210 |
| 4_02 | GAACGTCTCGTGGGCTCGG | | | |
| EasySci-RNA_P7- | CAAGCAGAAGACGGCATACGAGATTAAGGT | 1827 | GTTAACCTTA | 2211 |
| 4_03 | TAACGTCTCGTGGGCTCGG | | | |
| EasySci-RNA_P7- | CAAGCAGAAGACGGCATACGAGATCTACTA | 1828 | GGAGTAGTAG | 2212 |
| 4_04 | CTCCGTCTCGTGGGCTCGG | | | |
| EasySci-RNA_P7- | CAAGCAGAAGACGGCATACGAGATTCTCAA | 1829 | CAGGTTGAGA | 2213 |
| 4_05 | CCTGGTCTCGTGGGCTCGG | | | |
| EasvSci-RNA_P7- | CAAGCAGAAGACGGCATACGAGATGTTATTG | 1830 | AACCAATAAC | 2214 |
| 4_06 | GTTGTCTCGTGGGCTCGG | | | |
| EasySci-RNA_P7- | CAAGCAGAAGACGGCATACGAGATAATAGG | 1831 | GGTACCTATT | 2215 |
| 4_07 | TACCGTCTCGTGGGCTCGG | | | |
| EasySci-RNA_P7- | CAAGCAGAAGACGGCATACGAGATTGAGGC | 1832 | AGCTGCCTCA | 2216 |
| 4_08 | AGCTGTCTCGTGGGCTCGG | | | |
| EasySci-RNA_P7- | CAAGCAGAAGACGGCATACGAGATTACCAA | 1833 | TTGGTTGGTA | 2217 |
| 4_09 | CCAAGTCTCGTGGGCTCGG | | | |
| EasySci-RNA_P7- | CAAGCAGAAGACGGCATACGAGATCCGATA | 1834 | CTGATATCGG | 2218 |
| 4_10 | TCAGGTCTCGTGGGCTCGG | | | |
| EasySci-RNA_P7- | CAAGCAGAAGACGGCATACGAGATGTTCCAT | 1835 | TTGATGGAAC | 2219 |
| 4_11 | CAAGTCTCGTGGGCTCGG | | | |
| EasySci-RNA_P7- | CAAGCAGAAGACGGCATACGAGATCTTCTGG | 1836 | GGACCAGAAG | 2220 |
| 4_12 | TCCGTCTCGTGGGCTCGG | | | |
| EasySci-RNA_P7- | CAAGCAGAAGACGGCATACGAGATGACCTC | 1837 | ACCTGAGGTC | 2221 |
| 4_13 | AGGTGTCTCGTGGGCTCGG | | | |
| EasySci-RNA_P7- | CAAGCAGAAGACGGCATACGAGATCTCATTG | 1838 | TTGCAATGAG | 2222 |
| 4_14 | CAAGTCTCGTGGGCTCGG | | | |
| EasySci-RNA_P7- | CAAGCAGAAGACGGCATACGAGATGTCAGT | 1839 | ACTAACTGAC | 2223 |
| 4_15 | TAGTGTCTCGTGGGCTCGG | | | |
| EasySci-RNA_P7- | CAAGCAGAAGACGGCATACGAGATACCTCTT | 1840 | GGTAAGAGGT | 2224 |
| 4_16 | ACCGTCTCGTGGGCTCGG | | | |
| EasySci-RNA_P7- | CAAGCAGAAGACGGCATACGAGATTTGCGA | 1841 | GTAATCGCAA | 2225 |
| 4_17 | TTACGTCTCGTGGGCTCGG | | | |
| EasySci-RNA_P7- | CAAGCAGAAGACGGCATACGAGATTTCATCA | 1842 | ATATGATGAA | 2226 |
| 4_18 | TATGTCTCGTGGGCTCGG | | | |
| EasySci-RNA_P7- | CAAGCAGAAGACGGCATACGAGATCTTCCGT | 1843 | CCTACGGAAG | 2227 |
| 4_19 | AGGGTCTCGTGGGCTCGG | | | |
| EasySci-RNA_P7- | CAAGCAGAAGACGGCATACGAGATTCGGAG | 1844 | GACTCTCCGA | 2228 |
| 4_20 | AGTCGTCTCGTGGGCTCGG | | | |
| EasySci-RNA_P7- | CAAGCAGAAGACGGCATACGAGATACGTAT | 1845 | ATAGATACGT | 2229 |
| 4_21 | CTATGTCTCGTGGGCTCGG | | | |
| EasySci-RNA_P7- | CAAGCAGAAGACGGCATACGAGATTTGCTTC | 1846 | TATGAAGCAA | 2230 |
| 4_22 | ATAGTCTCGTGGGCTCGG | | | |
| EasySci-RNA_P7- | CAAGCAGAAGACGGCATACGAGATTCGTCTC | 1847 | GTAGAGACGA | 2231 |
| 4_23 | TACGTCTCGTGGGCTCGG | | | |
| EasySci-RNA_P7- | CAAGCAGAAGACGGCATACGAGATGTTATG | 1848 | TTCGCATAAC | 2232 |
| 4_24 | CGAAGTCTCGTGGGCTCGG | | | |
| EasySci-RNA_P7- | CAAGCAGAAGACGGCATACGAGATGGCGAA | 1849 | TAGATTCGCC | 2233 |
| 4_25 | TCTAGTCTCGTGGGCTCGG | | | |
| EasySci-RNA_P7- | CAAGCAGAAGACGGCATACGAGATCCGCGA | 1850 | TTCTTCGCGG | 2234 |
| 4_26 | AGAAGTCTCGTGGGCTCGG | | | |
| EasySci-RNA_P7- | CAAGCAGAAGACGGCATACGAGATAGACCA | 1851 | TTCTTGGTCT | 2235 |
| 4_27 | AGAAGTCTCGTGGGCTCGG | | | |
| EasySci-RNA_P7- | CAAGCAGAAGACGGCATACGAGATTAATCT | 1852 | GTATAGATTA | 2236 |
| 4_28 | ATACGTCTCGTGGGCTCGG | | | |
| EasySci-RNA_P7- | CAAGCAGAAGACGGCATACGAGATAGTCAT | 1853 | GACTATGACT | 2237 |
| 4_29 | AGTCGTCTCGTGGGCTCGG | | | |
| EasySci-RNA_P7- | CAAGCAGAAGACGGCATACGAGATTTCGCG | 1854 | GCTCCGCGAA | 2238 |
| 4_30 | GAGCGTCTCGTGGGCTCGG | | | |
| EasySci-RNA_P7- | CAAGCAGAAGACGGCATACGAGATGAATCG | 1855 | GGAACGATTC | 2239 |
| 4_31 | TTCCGTCTCGTGGGCTCGG | | | |
| EasySci-RNA_P7- | CAAGCAGAAGACGGCATACGAGATACGAAG | 1856 | GTACCTTCGT | 2240 |
| 4_32 | GTACGTCTCGTGGGCTCGG | | | |
| EasySci-RNA_P7- | CAAGCAGAAGACGGCATACGAGATAGTCGC | 1857 | TTATGCGACT | 2241 |
| 4_33 | ATAAGTCTCGTGGGCTCGG | | | |
| EasySci-RNA_P7- | CAAGCAGAAGACGGCATACGAGATACCAAC | 1858 | AACGGTTGGT | 2242 |
| 4_34 | CGTTGTCTCGTGGGCTCGG | | | |
| EasySci-RNA_P7- | CAAGCAGAAGACGGCATACGAGATTTCCTTC | 1859 | CTAGAAGGAA | 2243 |
| 4_35 | TAGGTCTCGTGGGCTCGG | | | |
| EasySci-RNA_P7- | CAAGCAGAAGACGGCATACGAGATTCCTCCA | 1860 | GTATGGAGGA | 2244 |
| 4_36 | TACGTCTCGTGGGCTCGG | | | |
| EasySci-RNA_P7- | CAAGCAGAAGACGGCATACGAGATGCTACTT | 1861 | CGTAAGTAGC | 2245 |
| 4_37 | ACGGTCTCGTGGGCTCGG | | | |
| EasySci-RNA_P7- | CAAGCAGAAGACGGCATACGAGATTTGACG | 1862 | TAGTCGTCAA | 2246 |
| 4_38 | ACTAGTCTCGTGGGCTCGG | | | |
| EasySci-RNA_P7- | CAAGCAGAAGACGGCATACGAGATTCCATA | 1863 | GTAGTATGGA | 2247 |
| 4_39 | CTACGTCTCGTGGGCTCGG | | | |
| EasySci-RNA_P7- | CAAGCAGAAGACGGCATACGAGATTACGTC | 1864 | AATGGACGTA | 2248 |
| 4_40 | CATTGTCTCGTGGGCTCGG | | | |
| EasySci-RNA_P7- | CAAGCAGAAGACGGCATACGAGATCAGCGA | 1865 | CCGTTCGCTG | 2249 |
| 4_41 | ACGGGTCTCGTGGGCTCGG | | | |
| EasySci-RNA_P7- | CAAGCAGAAGACGGCATACGAGATATATTG | 1866 | CAGTCAATAT | 2250 |
| 4_42 | ACTGGTCTCGTGGGCTCGG | | | |
| EasySci-RNA_P7- | CAAGCAGAAGACGGCATACGAGATTCAGTC | 1867 | GTCGGACTGA | 2251 |
| 4_43 | CGACGTCTCGTGGGCTCGG | | | |
| EasySci-RNA_P7- | CAAGCAGAAGACGGCATACGAGATGCGCAT | 1868 | TTCCATGCGC | 2252 |
| 4_44 | GGAAGTCTCGTGGGCTCGG | | | |
| EasySci-RNA_P7- | CAAGCAGAAGACGGCATACGAGATCATGCC | 1869 | GGACGGCATG | 2253 |
| 4_45 | GTCCGTCTCGTGGGCTCGG | | | |
| EasySci-RNA_P7- | CAAGCAGAAGACGGCATACGAGATACGTTG | 1870 | GGAGCAACGT | 2254 |
| 4_46 | CTCCGTCTCGTGGGCTCGG | | | |
| EasySci-RNA_P7- | CAAGCAGAAGACGGCATACGAGATAGCTAG | 1871 | CGTCCTAGCT | 2255 |
| 4_47 | GACGGTCTCGTGGGCTCGG | | | |
| EasySci-RNA_P7- | CAAGCAGAAGACGGCATACGAGATCTACTA | 1872 | ATATTAGTAG | 2256 |
| 4_48 | ATATGTCTCGTGGGCTCGG | | | |
| EasySci-RNA_P7- | CAAGCAGAAGACGGCATACGAGATAGAAGG | 1873 | AGTTCCTTCT | 2257 |
| 4_49 | AACTGTCTCGTGGGCTCGG | | | |
| EasySci-RNA_P7- | CAAGCAGAAGACGGCATACGAGATCCTTGA | 1874 | GCCTTCAAGG | 2258 |
| 4_50 | AGGCGTCTCGTGGGCTCGG | | | |
| EasySci-RNA_P7- | CAAGCAGAAGACGGCATACGAGATTGAGGC | 1875 | TAACGCCTCA | 2259 |
| 4_51 | GTTAGTCTCGTGGGCTCGG | | | |
| EasySci-RNA_P7- | CAAGCAGAAGACGGCATACGAGATAGACGT | 1876 | GAATACGTCT | 2260 |
| 4_52 | ATTCGTCTCGTGGGCTCGG | | | |
| EasySci-RNA_P7- | CAAGCAGAAGACGGCATACGAGATAAGGCT | 1877 | GATGAGCCTT | 2261 |
| 4_53 | CATCGTCTCGTGGGCTCGG | | | |
| EasySci-RNA_P7- | CAAGCAGAAGACGGCATACGAGATAGTCTC | 1878 | TACGGAGACT | 2262 |
| 4_54 | CGTAGTCTCGTGGGCTCGG | | | |
| EasySci-RNA_P7- | CAAGCAGAAGACGGCATACGAGATAATGAC | 1879 | AGAGGTCATT | 2263 |
| 4_55 | CTCTGTCTCGTGGGCTCGG | | | |
| EasySci-RNA_P7- | CAAGCAGAAGACGGCATACGAGATTAACTG | 1880 | CGGCCAGTTA | 2264 |
| 4_56 | GCCGGTCTCGTGGGCTCGG | | | |
| EasySci-RNA_P7- | CAAGCAGAAGACGGCATACGAGATTTAAGC | 1881 | TAGCGCTTAA | 2265 |
| 4_57 | GCTAGTCTCGTGGGCTCGG | | | |
| EasySci-RNA_P7- | CAAGCAGAAGACGGCATACGAGATCATAAG | 1882 | CAACCTTATG | 2266 |
| 4_58 | GTTGGTCTCGTGGGCTCGG | | | |
| EasySci-RNA_P7- | CAAGCAGAAGACGGCATACGAGATTTCGTCG | 1883 | CTTCGACGAA | 2267 |
| 4_59 | AAGGTCTCGTGGGCTCGG | | | |
| EasySci-RNA_P7- | CAAGCAGAAGACGGCATACGAGATCTCGGA | 1884 | AGAGTCCGAG | 2268 |
| 4_60 | CTCTGTCTCGTGGGCTCGG | | | |
| EasySci-RNA_P7- | CAAGCAGAAGACGGCATACGAGATCGAACC | 1885 | CTATGGTTCG | 2269 |
| 4_61 | ATAGGTCTCGTGGGCTCGG | | | |
| EasySci-RNA_P7- | CAAGCAGAAGACGGCATACGAGATGCCAAT | 1886 | AACTATTGGC | 2270 |
| 4_62 | AGTTGTCTCGTGGGCTCGG | | | |
| EasySci-RNA_P7- | CAAGCAGAAGACGGCATACGAGATACCTCG | 1887 | CTTGCGAGGT | 2271 |
| 4_63 | CAAGGTCTCGTGGGCTCGG | | | |
| EasySci-RNA_P7- | CAAGCAGAAGACGGCATACGAGATACGAGC | 1888 | TTCGGCTCGT | 2272 |
| 4_64 | CGAAGTCTCGTGGGCTCGG | | | |
| EasySci-RNA_P7- | CAAGCAGAAGACGGCATACGAGATCAGACT | 1889 | CTCAAGTCTG | 2273 |
| 4_65 | TGAGGTCTCGTGGGCTCGG | | | |
| EasySci-RNA_P7- | CAAGCAGAAGACGGCATACGAGATCAGGCC | 1890 | ATTAGGCCTG | 2274 |
| 4_66 | TAATGTCTCGTGGGCTCGG | | | |
| EasySci-RNA_P7- | CAAGCAGAAGACGGCATACGAGATACGTTA | 1891 | TGGCTAACGT | 2275 |
| 4_67 | GCCAGTCTCGTGGGCTCGG | | | |
| EasySci-RNA_P7- | CAAGCAGAAGACGGCATACGAGATAATATT | 1892 | AGCTAATATT | 2276 |
| 4_68 | AGCTGTCTCGTGGGCTCGG | | | |
| EasySci-RNA_P7- | CAAGCAGAAGACGGCATACGAGATGAAGAT | 1893 | AGGAATCTTC | 2277 |
| 4_69 | TCCTGTCTCGTGGGCTCGG | | | |
| EasySci-RNA_P7- | CAAGCAGAAGACGGCATACGAGATGTCTGG | 1894 | AAGACCAGAC | 2278 |
| 4_70 | TCTTGTCTCGTGGGCTCGG | | | |
| EasySci-RNA_P7- | CAAGCAGAAGACGGCATACGAGATCGCTTAT | 1895 | ACCATAAGCG | 2279 |
| 4_71 | GGTGTCTCGTGGGCTCGG | | | |
| EasySci-RNA_P7- | CAAGCAGAAGACGGCATACGAGATGTAATA | 1896 | TGCTTATTAC | 2280 |
| 4_72 | AGCAGTCTCGTGGGCTCGG | | | |
| EasySci-RNA_P7- | CAAGCAGAAGACGGCATACGAGATAATGCT | 1897 | ATAGAGCATT | 2281 |
| 4_73 | CTATGTCTCGTGGGCTCGG | | | |
| EasySci-RNA_P7- | CAAGCAGAAGACGGCATACGAGATCAAGAT | 1898 | AATTATCTTG | 2282 |
| 4_74 | AATTGTCTCGTGGGCTCGG | | | |
| EasySci-RNA_P7- | CAAGCAGAAGACGGCATACGAGATCGCGCG | 1899 | GTTCCGCGCG | 2283 |
| 4_75 | GAACGTCTCGTGGGCTCGG | | | |
| EasySci-RNA_P7- | CAAGCAGAAGACGGCATACGAGATCGGACT | 1900 | CCGAAGTCCG | 2284 |
| 4_76 | TCGGGTCTCGTGGGCTCGG | | | |
| EasySci-RNA_P7- | CAAGCAGAAGACGGCATACGAGATATCATG | 1901 | TTACCATGAT | 2285 |
| 4_77 | GTAAGTCTCGTGGGCTCGG | | | |
| EasySci-RNA_P7- | CAAGCAGAAGACGGCATACGAGATGCCATC | 1902 | TATAGATGGC | 2286 |
| 4_78 | TATAGTCTCGTGGGCTCGG | | | |
| EasySci-RNA_P7- | CAAGCAGAAGACGGCATACGAGATCCAGAT | 1903 | GCATATCTGG | 2287 |
| 4_79 | ATGCGTCTCGTGGGCTCGG | | | |
| EasySci-RNA_P7- | CAAGCAGAAGACGGCATACGAGATCTTCTAG | 1904 | ACTCTAGAAG | 2288 |
| 4_80 | AGTGTCTCGTGGGCTCGG | | | |
| EasySci-RNA_P7- | CAAGCAGAAGACGGCATACGAGATCATATTC | 1905 | CAAGAATATG | 2289 |
| 4_81 | TTGGTCTCGTGGGCTCGG | | | |
| EasySci-RNA_P7- | CAAGCAGAAGACGGCATACGAGATCGCGCA | 1906 | CTGCTGCGCG | 2290 |
| 4_82 | GCAGGTCTCGTGGGCTCGG | | | |
| EasySci-RNA_P7- | CAAGCAGAAGACGGCATACGAGATCCGTAA | 1907 | CATATTACGG | 2291 |
| 4_83 | TATGGTCTCGTGGGCTCGG | | | |
| EasySci-RNA_P7- | CAAGCAGAAGACGGCATACGAGATCATTCC | 1908 | CGGCGGAATG | 2292 |
| 4_84 | GCCGGTCTCGTGGGCTCGG | | | |
| EasySci-RNA_P7- | CAAGCAGAAGACGGCATACGAGATTTCAGA | 1909 | TGCTTCTGAA | 2293 |
| 4_85 | AGCAGTCTCGTGGGCTCGG | | | |
| EasySci-RNA_P7- | CAAGCAGAAGACGGCATACGAGATAGAAGA | 1910 | GTATTCTTCT | 2294 |
| 4_86 | ATACGTCTCGTGGGCTCGG | | | |
| EasySci-RNA_P7- | CAAGCAGAAGACGGCATACGAGATATTACT | 1911 | CAGTAGTAAT | 2295 |
| 4_87 | ACTGGTCTCGTGGGCTCGG | | | |
| EasySci-RNA_P7- | CAAGCAGAAGACGGCATACGAGATGTCTCC | 1912 | CCGCGGAGAC | 2296 |
| 4_88 | GCGGGTCTCGTGGGCTCGG | | | |
| EasySci-RNA_P7- | CAAGCAGAAGACGGCATACGAGATGCCGAC | 1913 | GCTCGTCGGC | 2297 |
| 4_89 | GAGCGTCTCGTGGGCTCGG | | | |
| EasySci-RNA_P7- | CAAGCAGAAGACGGCATACGAGATTGCCTCT | 1914 | CTTAGAGGCA | 2298 |
| 4_90 | AAGGTCTCGTGGGCTCGG | | | |
| EasySci-RNA_P7- | CAAGCAGAAGACGGCATACGAGATCGTCTTG | 1915 | GACCAAGACG | 2299 |
| 4_91 | GTCGTCTCGTGGGCTCGG | | | |
| EasySci-RNA_P7- | CAAGCAGAAGACGGCATACGAGATACCATC | 1916 | AGCAGATGGT | 2300 |
| 4_92 | TGCTGTCTCGTGGGCTCGG | | | |
| EasySci-RNA_P7- | CAAGCAGAAGACGGCATACGAGATATGGTT | 1917 | AATTAACCAT | 2301 |
| 4_93 | AATTGTCTCGTGGGCTCGG | | | |
| EasySci-RNA_P7- | CAAGCAGAAGACGGCATACGAGATAGCGAG | 1918 | CAGACTCGCT | 2302 |
| 4_94 | TCTGGTCTCGTGGGCTCGG | | | |
| EasySci-RNA_P7- | CAAGCAGAAGACGGCATACGAGATAACGGC | 1919 | CTTCGCCGTT | 2303 |
| 4_95 | GAAGGTCTCGTGGGCTCGG | | | |
| EasySci-RNA_P7- | CAAGCAGAAGACGGCATACGAGATGGTTGG | 1920 | CCTGCCAACC | 2304 |
| 4_96 | CAGGGTCTCGTGGGCTCGG | | | |

### PCR (45 m))

[0552] Add 20 μL NEBNext Master Mix into each well and pipet up and down. Place samples into a thermocycler and run the following reaction:
   [0553] 72 C for 5 minutes
   [0554] 98 C for 30 seconds
   [0555] 12-15 cycles of 98 C for 10 seconds, 66 C for 30 seconds, 72 C for 30 seconds
   [0556] 72 C for 5 minutes
   [0557] *may be helpful to run a qPCR to determine the optimal number of cycles for amplification*.
[0558] Can store the resulting PCR products in −20 C (STOP POINT).

### Library Purification (1 h)

[0559] Pool all the wells together and take 200 μL of the PCR product and perform a 0.8× ampure beads purification: start with adding 160 μL beads to the 200 μL of solution. Mix the solution via vortexing and let the resulting solution sit at room temperature for 5 minutes.
[0560] Place the solution on a magnetic rack and let the solution sit for 5 minutes until the beads are removed from the solution.
[0561] Aspirate and remove the solution, making sure not to touch the beads. Add 1 mL of 80% ethanol to rinse beads and then remove the ethanol.
[0562] Add 1 mL of 80% ethanol for a second wash and then remove the ethanol.
[0563] Elute the bead using 105 μL of elution buffer and mix by vortexing. Let the resulting solution sit at room temperature for 3 minutes.
[0564] Place the solution on the magnetic rack, and let the solution incubate for 3 minutes.
[0565] Transfer 100 μL of the solution into a new tube and add 90 μL ampure beads for a second, 0.9× ampure beads purification. Vortex to mix and let the solution sit at room temperature for 5 minutes.
[0566] Place the solution on a magnetic rack and let the solution sit for 5 minutes. Afterwards, aspirate the supernatant.
[0567] Wash twice with 1 mL 80% ethanol and then add 20 μL EB buffer to the tube and vortex. Let the solution sit for 3 minutes at room temperature.
[0568] Place the solution on the magnetic rack and let the solution sit for 3 minutes. Take out 18 μL of the remaining solution and transfer it to a new tube.
[0569] Quantify the library concentration and visualize the library via electrophoresis (performed using a Qubit and a 2% Agarose E-Gel). An example library is shown in FIG. 19.
[0570] Sequence the library on the Novaseq Platform.

### Example 3: Tracking Cell-Type-Specific Proliferation and Differentiation Dynamics in Mammalian Brains Across the Lifespan

[0571] Herein is described a novel method, TrackerSci, to track the proliferation and differentiation dynamics of newborn cells at the scale of the entire mammalian brain. TrackerSci integrated protocols for labeling newly synthesized DNA with a thymidine analog 5-Ethynyl-2-deoxyuridine (EdU) (Salic et al., Proc. Natl. Acad. Sci. U.S.A 105, 2415-2420 (2008)) and single-cell combinatorial indexing sequencing for both transcriptome (Cao et al., Nature 566, 496-502 (2019)) and chromatin accessibility profiling (Domcke et al., Science 370, (2020)). As a demonstration, TrackerSci was applied to profile the single-cell transcriptome or chromatin accessibility dynamics for a total of 14,689 newborn cells from entire mouse brains spanning three age stages and two genotypes. With the resulting datasets, rare progenitor cell populations often missed in conventional single-cell analysis were recovered and their cell-type-specific proliferation and differentiation dynamics were tracked across conditions. Furthermore, the genetic and epigenetic signatures associated with the alteration of cellular dynamics (e.g., adult neurogenesis, oligodendrogenesis) upon ageing were identified. The experimental and computational methods described here could be broadly applied to track the regenerative capacity and differentiation potential of cells across main mammalian organs and other biological systems.

[0572] TrackerSci relies on the following steps (FIG. 20a): (i) Mice are labeled with 5-Ethynyl-2-deoxyuridine (EdU), a thymidine analog that can be incorporated into replicating DNA for labeling in vivo cellular proliferation (Salic et al., Proc. Natl. Acad. Sci. U.S.A 105, 2415-2420 (2008); Lin et al., Cytotherapy 11, 864-873 (2009)). (ii) Brain are dissected, and nuclei are extracted, fixed, and then subjected to click chemistry-based in situ ligation (Clarke et al., Curr. Protoc. Cytom. 82, 7.49.1-7.49.30 (2017)) to an azide-containing fluorophore, followed by fluorescence-activated cell sorting (FACS) to enrich the EdU+ cells (FIG. 21a). (iii) Indexed reverse transcription or transposition is used to introduce the first round of indexing. Cells from all wells are pooled and then redistributed into multiple 96-well plates through FACS sorting to further purify the EdU+ cells (FIG. 21b). (iv) Library preparation protocols were followed similar to sci-RNA-seq (Cao et al., Nature 566, 496-502 (2019)) for transcriptome profiling or sci-ATAC-seq (Domcke et al., Science 370, (2020)) for chromatin accessibility analysis. Most cells pass through a unique combination of wells, such that their contents are marked by a unique combination of barcodes that can be used to group reads derived from the same cell. Notably, the two sorting steps implemented in TrackerSci are essential for excluding contaminating cells and enriching extremely rare proliferating cell populations, especially in the aged brain (less than 0.1% of the total cell population are EdU+ cells).

[0573] The reaction conditions were extensively optimized (e.g., fixation, permeabilization, and click-chemistry reaction) to ensure the approach is fully compatible with FACS sorting and single-cell transcriptome and chromatin accessibility profiling (FIG. 22-FIG. 23). For instance, the active Cu(I) catalyst and additive included in the conventional click-chemistry reaction (Habib et al., Science 353, 925-928 (2016)) significantly reduced the nuclei quality for single-cell gene expression analysis (FIG. 22a). To solve this problem, a click-chemistry method was tested using picolyl azide dye and copper protectant, which resulted in a minimal defect on library complexity (FIG. 22b) or cell purity for single-cell RNA-seq analysis, as shown in an experiment profiling a mixture of human HEK293T and mouse NIH/3T3 cells (FIG. 22c,d). As a quality control, the TrackerSci chromatin accessibility profile was compared with the conventional sci-ATAC-seq profile in a mixture of human HEK293T and mouse NIH/3T3 cells. Both methods showed similar cellular purity (FIG. 23a), fragment length distributions (FIG. 23b), a comparable number of unique fragments per cell, and a similar ratio of reads overlapping with promoters in both cell lines and mouse brain nuclei (FIG. 23c, d).

[0574] Additionally, the aggregated transcriptome and chromatin accessibility profiles derived from TrackerSci (both cultured cell lines and tissues) were highly correlated with conventional single-cell combinatorial indexing profiling (FIG. 22e, FIG. 23e), suggesting that the labeling and conjugating reactions (e.g., EdU labeling and click-chemistry) in TrackerSci do not substantially interfere with downstream single-cell transcriptome and chromatin accessibility profiling by combinatorial indexing.

[0575] The analysis illustrates the unique advantage of TrackerSci over solely profiling global brain populations. For example, TrackerSci enabled reconstruction of continuous cellular differentiation trajectories in adult or even aged organs by detecting intermediate progenitor cell states that are often missed in traditional single-cell analysis. Moreover, it was possible to calculate the proliferation and differentiation potential of rare progenitor cells, facilitating the quantitative investigation of the impact of ageing on adult neurogenesis and oligodendrogenesis. In addition, age-dependent changes in cell-type-specific proliferation and differentiation dynamics were investigated and novel insights into underlying transcriptional and epigenetic mechanisms are provided.

[0576] The field of single-cell biology is progressing at an astonishing rate to catalog and characterize every single cell type across diverse biological systems. Although the adult or aged brains have been intensively profiled with single-cell methods (Saunders et al., Cell 174, 1015-1030.e16 (2018); Zeisel et al., Cell 174, 999-1014.e22 (2018); Li et al., Nature 598, 129-136 (2021)), capturing progenitor cells and revealing their proliferation and differentiation dynamics has been challenging. The TrackerSci method is the first technique to track both transcriptional and epigenetic dynamics of proliferating cells based on combinatorial indexing. Like other sci-seq techniques (Cao et al., Science 370, (2020); Domcke et al., Science 370, (2020)), TrackerSci is compatible with fresh or fixed nuclei, and can process multiple samples concurrently per experiment to reduce the batch effect. In this study, TrackerSci was applied to profile the single-cell transcriptome or chromatin accessibility dynamics for a total of 14,689 newborn cells from entire mouse brains spanning three age stages and two genotypes. Considering the rarity of the progenitor cells in the adult and aged brains, it required deep sequencing of up to 15 million brain cells to recover the same amount of progenitor cells.

[0577] There is a consensus that the self-renewal and regeneration capacity of progenitor cells reduces during aging. By a comprehensive and quantitative view of the cell-type-specific proliferation and differentiation dynamics, however, a heterogeneous cell response to ageing was observed across newborn cell types. While ageing impairs neurogenesis mainly through a depleted pool of neuronal progenitors as expected, newborn oligodendrocyte progenitors were found to be mildly affected. Instead, the intermediate differentiation precursors are remarkably lower in frequency, suggesting that ageing affects oligodendrocytes mainly by blocking their differentiation process. Intriguingly, an age-dependent increase of Smpd4 (sphingomyelin synthase) and a decrease of Sgms1 (sphingomyelin phosphodiesterase) in the oligodendrocytes progenitor cells was detected, indicating a high cellular ceramide level in the aged OPCs. The data suggest a critical role of sphingomyelin metabolism in ageing-induced block of oligodendrocyte differentiation. In addition, dysregulated immune responses during ageing, such as the accelerated proliferation of an Apoe+Csf1+ microglia subtype and an increased C4b expression in OPCs from both the EdU+ population and the global pool was detected (FIG. 24). Further investigation could be helpful in deciphering the links between increased inflammation burden and the failure of oligodendrocyte differentiation in the aged brain.

[0578] In summary, the study represents a crucial step toward understanding the impact of ageing on the proliferation and differentiation of newborn cells across the entire brain. The continued development of methods and integration of other sci-seq techniques for concurrent profiling gene expression and chromatin accessibility state in concert with spatial, proteomics, and lineage history will facilitate a comprehensive view of the global molecular programs regulating cell-type-specific proliferation and differential dynamics during ageing, thereby informing potential pathways to restore tissue homeostasis for patients with ageing-related diseases.

[0579] The Materials and Methods used for the experiments are now described.

### Data Reporting

[0580] No statistical methods were used to predetermine sample size. Animals used in experiments were randomized before sample preparation. Investigators were blinded to group allocation during data collection and analysis.

### Animal

[0581] The C57BL/6 mice were obtained from The Jackson Laboratory.

### EdU Labeling of Mammalian Cell Culture

[0582] HEK293T and NIH/3T3 cells (gift from B. Martin, University of Washington) were cultured in 10 cm dishes at 37° C. with 5% CO₂ in high glucose DMEM (Gibco, 11965-118) supplemented with 10% Fetal Bovine Serum (Sigma-Aldrich, F4135) and 1× penicillin-streptomycin (Gibco, 15140-122).

[0583] EdU (5-ethynyl-2′-deoxyuridine) (Thermo Fisher Scientific, A10044) was added to culture media at 10 μM final concentration for 1 hour. After labeling, cells were harvested with 0.25% trypsin-EDTA. HEK293T and NIH/3T3 cells were combined at a 1:1 ratio, washed with ice-cold PBS, and lysed in 1 mL ice-cold EZ lysis buffer (Millipore Sigma, NUC101). The nuclei were then fixed on ice with 1% formaldehyde (Thermo Fisher Scientific, 28906) for 10 minutes and washed with EZ lysis buffer, filtered with 40 μm cell strainers (Ward's Science, 470236-276), and resuspended in Nuclei Suspension Buffer (NSB) (10 mM Tris-HCl pH 7.5 (VWR, 97062-936), 10 mM NaCl (VWR, 97062-858), 3 mM MgCl₂ (VWR, 97062-848) supplemented with 0.1% SUPERase⋅In™ RNase Inhibitor (Thermo Fisher Scientific, AM2696) and 1% BSA for TrackerSci-RNA or supplemented with 0.1% Tween-20 (Sigma, P9416-100ML), 1× cOmplete™, EDTA-free Protease Inhibitor Cocktail (Sigma, 11873580001) and 0.1% IGEPAL® CA-630 (VWR, IC0219859650) for TrackerSci-ATAC experiment.

### EdU Labeling of Mouse Tissues

[0584] C57BL/6J mice of different age groups and 5×FAD transgenic mice (MMRRC Strain #034840-JAX) were obtained from The Jackson Laboratory. Mice were injected intraperitoneally with 50 mg/kg of EdU in PBS at 24-hour intervals for five days, and mouse brains were harvested 24 hours after the final injection.

[0585] C57BL/6J mice obtained from The Jackson Laboratory were labeled and harvested for pulse-chase labeling at various time points. Specifically, four mice (two male and two female) were injected intraperitoneally with 50 mg/kg of EdU in PBS for 3 days at 24-hour intervals, and brains were harvested 24 hours after the final injection. 12 mice were injected intraperitoneally with 50 mg/kg of EdU in PBS for five days at 24-hour intervals. In addition, for five-day injections, four mice (two male and two female) were harvested 1 day, 3 days, and 5 days after the final injection.

### Tissue Collection and Nuclei Isolation

[0586] Whole brains were extracted from mice, immediately snap-frozen in liquid nitrogen, and stored at −80° C. upon further usage. For nuclei isolations, thawed brains were cut into small pieces with fine scissors (Fine Science Tools, 14060-09) in 1 mL ice-cold PBS with 1% SUPERase⋅In™ RNase Inhibitor and 1% BSA, pelleted, resuspended in 1.5 mL Nuclei Isolation Buffer (EZ Lysis Buffer supplemented with 1% SUPERase⋅In™ RNase Inhibitor, 1% BSA and 1× cOmplete™ EDTA-free Protease Inhibitor Cocktail) for 5 minutes on ice, and homogenized through 40 μm cell strainers (VWR, 470236-276) with the rubber tips of syringes. Then, extracted nuclei were pelleted, fixed in 1% formaldehyde on ice for 10 minutes, washed twice with NSB, and divided into two aliquots for both sci-RNA-seq and sci-ATAC-seq profiling. Nuclei subjected to sci-RNA-seq were briefly sonicated (Diagenode, low power mode for 12 seconds) to reduce clumping. Finally, nuclei were filtered through pluriStrainer Mini 20 um filters (Pluriselect, 43-10020-70), resuspended in 100 μL NSB, snap frozen in liquid nitrogen, and stored at −80° C. until further usage.

### TrackerSci-RNA

[0587] EdU staining was performed on thawed nuclei using Click-iT Plus EdU Alexa Fluor™ 647 Flow Cytometry assay Kit (Thermo Fisher Scientific, 10634). A 500 μL reaction buffer (prepared following the manufacturer's protocol) supplemented with 1% SUPERase⋅In™ RNase Inhibitor was added directly to the nuclei suspension, mixed well and left in RT for 30 minutes. Then, nuclei were spun down for 5 minutes at 500 g (4° C.), washed once with 500 μL of 1× Click-iT saponin-based permeabilization and wash reagent, resuspended in 1 mL NSB with 1:20 dilution of 0.25 mg/ml 4′,6-diamidino-2-phenylindole (DAPI, Invitrogen D1306) and FACS sorted. Alexa647 and DAPI positive nuclei were sorted into 96-well plates with each well (250˜500 nuclei/well) containing 4 μL of NSB. Sorted plates were briefly centrifuged, mixed with 1 μL of 50 μM oligo-dT primer (5′-(SEQ ID NO: 2447) ACGACGCTCTTCCGATCTNNNNNNNN [10 bp-index] TTTTTTTTTTTTTTTTTTTTTTTTTTTTTTVN-3′ (SEQ ID NO:2448), where “N” is any base and “V” is either “A”, “C” or “G”, IDT) and 0.5 μL 10 mM dNTP mix (Thermo Fisher Scientific, R0194) and denatured at 55° C. for 5 minutes and immediately placed on ice. 3.5 μL of first-strand reaction mix, containing 2 μL 5× SuperScript™ IV Reverse Transcriptase Buffer (Invitrogen, 18090200), 0.5 μL 100 mM DTT (Invitrogen, P2325), 0.5 μL SuperScript™ IV Reverse Transcriptase (Invitrogen, 18090200), 0.5 μL RNaseOUT™ Recombinant Ribonuclease Inhibitor (Invitrogen, 10777019) was then added to each well. Reverse transcription was carried out by incubating plates at the following temperature gradient: 4° C. 2 minutes, 10° C. 2 minutes, 20° C. 2 minutes, 30° C. 2 minutes, 40° C. 2 minutes, 50° C. 2 minutes and 55° C. 10 minutes, and was stopped by adding 1 μL of 18 mM EDTA (VWR, 97062-656) to each well. All nuclei were then pooled, stained with DAPI at a final concentration of 3 μM, and sorted at 25 nuclei per well into 5 μL EB buffer. Cells were gated based on DAPI and Alexa647 such that singlets were discriminated from doublets and EdU+ cells were purified. 0.66 μL mRNA Second Strand Synthesis buffer and 0.34 μL mRNA Second Strand Synthesis enzyme (NEB, E6111L) were then added to each well. Second strand synthesis was carried out at 16° C. for 1 hour. 6 μL tagmentation reaction mix (made by mixing 0.5 μL self-loaded Tn5 with 200 μL Tagmentation buffer containing 20 mM Tris-HCl PH 7.5, 20 mM MgCl₂, 20% Dimethylformamide (Fisher, AC327175000)) was added to each well and tagmentation was performed at 55° C. for 5 minutes. After tagmentation, each well was mixed with 0.4 μL 1% SDS, 0.4 μL BSA (NEB, B90000S), and 2 μL of 10 μM P5 primer (5′-(SEQ ID NO:2415) AATGATACGGCGACCACCGAGATCTACA [15] CCCTACACGACGCTCTTCCGAT CT-3′ (SEQ ID NO:2416), IDT), and incubated at 55° C. for 15 minutes. Then, 2 μL 10% Tween-20, 1.2 μL nuclease-free water and 2 μL of 10 μM indexed P7 primer (5′-(SEQ ID NO: 2417) CAAGCAGAAGACGGCATACGAGAT [17] GTCTCGTGGGCTCGG-3′ (SEQ ID NO: 2418), IDT), and 20 μL NEBNext High-Fidelity 2× PCR Master Mix (NEB, M0541L) were added to each well. Amplification was carried out using the following program: 72° C. for 5 minutes, 98° C. for 30 seconds, 18-22 cycles of (98° C. for 10 seconds, 66° C. for 30 seconds, 72° C. for 1 minute), and a final 72° C. for 5 minutes. After PCR, samples were pooled and purified using 0.8 volumes of AMPure XP beads (Beckman Coulter, A63882) twice. Library concentrations were determined by Qubit (Invitrogen, Q33231), and the libraries were visualized by electrophoresis on a 2% E-Gel™ EX Agarose Gels (Invitrogen, G402022). All RNA-seq libraries were sequenced on the NextSeq 1000 platform (Illumina) using a 100 cycle kit (Read 1:58 cycles, Read 2:60 cycles, Index 1:10 cycles, Index 2:10 cycles). The TrackerSci RNA-seq library was sequenced to ˜20,000 reads per cell.

### TrackerSci-ATAC

[0588] EdU staining was performed on thawed nuclei using Click-iT Plus EdU Alexa Fluor™ 647 Flow Cytometry assay Kit (Thermo Fisher Scientific, 10634). A 500 μL reaction buffer (prepared following the manufacturer's protocol) supplemented with 1× cOmplete™ EDTA-free Protease Inhibitor Cocktail was added directly to the nuclei suspension, mixed well, and left in RT for 30 minutes. Then, nuclei were spun down for 5 minutes at 500 g (4° C.), washed once with 500 μL of 1× Click-iT saponin-based permeabilization and wash reagent, resuspended in 1 mL NSB with 1:20 dilution of 0.25 mg/ml 4′,6-diamidino-2-phenylindole (DAPI) and FACS sorted. Alexa647 and DAPI positive nuclei were sorted into 96-well plates with each well (250˜500 nuclei/well) containing 4 μL of NSB. Sorted plates were briefly centrifuged, mixed with 5 μL 2× TD buffer (20 mM Tris-HCl pH 7.5, 20 mM MgCl₂, 20% Dimethylformamide) and 1 μL barcoded Tn5. Tagmentation reaction was performed at 55° C. for 30 minutes and stopped by adding 11 μL 2× Stop buffer (40 mM EDTA, 1 mM Spermidine (Sigma, S0266)) to each well. All nuclei were then pooled, stained with DAPI at a final concentration of 3 μM, and sorted at 25 nuclei per well into 5 μL EB buffer. Cells were gated based on DAPI and Alexa647 such that singlets were discriminated from doublets and EdU+ cells were purified. After sorting, each well was mixed with 0.25 μL 18.9 mg/mL proteinase K (Sigma, 3115828001), 0.25 μL 1% SDS and 0.5 μL nuclease-free water, and reverse crosslinking was performed at 65° C. for 16 hours. Then, 2 μL 10% Tween-20 was added to each well to quench the SDS. Following on, 1 μL of 10 μM indexed P5 primer (5′-(SEQ ID NO:2415)

[0589] AATGATACGGCGACCACCGAGATCTACA [15] CCCTACACGACGC TCTTCCGATCT-3′ (SEQ ID NO:2449), IDT), 1 μL of 10 μM indexed P7 primer (5′-′-(SEQ ID NO:2419) CAAGCAGAAGACGGCATACGAGAT [17] GTGACTGGAGTTCAGACGTGTGCTCT TCCGATCT-3′ (SEQ ID NO:2420), IDT) and 10 μL NEBNext High-Fidelity 2× PCR Master Mix were added into each well. Amplification was carried out using the following program: 72° C. for 5 minutes, 98° C. for 30 seconds, 15-16 cycles of (98° C. for 10 seconds, 66° C. for 30 seconds, 72° C. for 1 minute), and a final 72° C. for 5 minutes. Final PCR products were pooled and purified by a Zymoclean DNA clean and concentration kit (Zymoresearch, D4014). Library concentrations were determined by Qubit, and the libraries were visualized by electrophoresis on a 2% E-Gel™ EX Agarose Gels. All ATAC-seq libraries were sequenced on the NextSeq 1000 platform (Illumina) using a 100 cycle kit (Read 1:58 cycles, Read 2:60 cycles, Index 1:10 cycles, Index 2:10 cycles). The TrackerSci ATAC-seq library was sequenced to ˜50,000 reads per cell.

### TrackerSci-RNA Data Processing

[0590] Read alignment and gene count matrix generation for the scRNA-seq were performed using the pipeline that was previously developed (Cao, J. et al. Science 357, 661-667 (2017)). Briefly, base calls were converted to fastq format and demultiplexed using Illumina's bcl2fastq/v2.19.0.316 tolerating one mismatched base in barcodes (edit distance (ED)<2). The RT barcode for each read was corrected to its nearest barcode (edit distance (ED)<2), and reads with uncorrected barcodes (ED>=2) were removed. Demultiplexed reads were then adaptor clipped using trim_galore/v0.4.1 (https://github.com/FelixKrueger/TrimGalore) with default settings. Trimmed reads were mapped to a chimeric reference genome of human and mouse (hg19/mm10) for the species-mixing experiment and to the mouse only (mm39) for mouse brain experiments, using STAR/v2.5.2b (Dobin et al., Bioinformatics 29, 15-21 (2013)) with default settings. Uniquely mapping reads were extracted, and duplicates were removed using the unique molecular identifier (UMI) sequence, reverse transcription (RT) index, and read 2 end-coordinate (i.e. reads with identical UMI, RT index, and tagmentation site were considered duplicates). Finally, mapped reads were split into constituent cellular indices by further demultiplexing reads using the RT index.

[0591] To generate digital expression matrices, the number of strand-specific UMIs for each cell mapping to the exonic and intronic regions of each gene was calculated with python/v2.7.18 HTseq package (Anders et al., Bioinformatics 31, 166-169 (2015)). For multi-mapped reads, reads were assigned to the closest gene, except in cases where another intersected gene fell within 100 bp to the end of the closest gene, in which case the read was discarded. For most analyses, both expected-strand intronic and exonic UMIs in per-gene single-cell expression matrices were included. Exonic and intronic gene count matrices were used in RNA velocity analysis.

[0592] For the species-mixing experiment, RNA barcodes with more than 200 UMIs and 100 unique genes were identified as real cells, and those with fewer than that were discarded. The percentage of uniquely mapping reads for genomes of each species was calculated. Cells with over 90% of UMIs assigned to one species were regarded as species-specific cells, with the remaining cells classified as mixed cells or “collisions”. The collision rate was calculated as the ratio of mixed cells.

### TrackerSci-ATAC Data Processing

[0593] Single-cell ATAC-seq data was performed using a published pipeline (Cusanovich et al., Science 348, 910-914 (2015); Cao et al., Science 361, 1380-1385 (2018)) with mild modifications. Base calls were converted to fastq format and demultiplexed using Illumina's bcl2fastq/v2.19.0.316 tolerating one mismatched base in barcodes (edit distance (ED)<2). The indexed Tn5 barcode for each read was corrected to its nearest barcode (edit distance (ED)<2), and reads with uncorrected barcodes (ED>=2) were removed. Demultiplexed reads were then adaptor-clipped using trim_galore/0.4.1 with default settings. Trimmed reads were mapped to a chimeric reference genome of human and mouse (hg19/mm10) for the species-mixing experiment and to the mouse only (mm39) for mouse brain experiments, using STAR/v2.5.2b (Dobin et al., Bioinformatics 29, 15-21 (2013)) with default settings. Duplicates were removed by picard MarkDuplicates/v2.25.2 (broadinstitute.github.io/picard/) per PCR sample. Deduplicated reads were split into constituent cellular indices by further demultiplexing reads using the Tn5 index.

[0594] A snap-format (Single-Nucleus Accessibility Profiles) file was generated from deduplicated bam files using SnapTools/v1.4.8 with default settings (github.com/r3fang/SnapTools) (Fang et al., Nat. Commun. 12, 1337 (2021)). A cell-by-bin count matrix with 5 kb bin size was created from the resulting snapfile. The promoter ratio for each cell was calculated as the number of fragments mapping to genomic bins overlapping with promoter regions (defined as 2 kb upstream of the gene body).

[0595] For the species-mixing experiment, ATAC barcodes with more than 1000 fragments and more than 0.2 promoter ratio were identified as real cells, and those with fewer than that were discarded. The percentage of uniquely mapping reads for genomes of each species was calculated. Cells with over 90% of reads assigned to one species were considered species-specific cells, with the remaining cells classified as mixed cells or “collisions”. The collision rate was calculated as the ratio of mixed cells.

### Cell Filtering, Clustering, and Annotation for TrackerSci RNA

[0596] A digital gene expression matrix was constructed from the raw sequencing data as described above. EdU+ cells and global cells were combined and analyzed together. Cells with less than 200 UMIs and 100 unique genes were discarded. Potential doublet cells and doublet-derived subclusters were detected using an iterative clustering strategy similar to before (Cao et al., Science 370, (2020)). Cells labeled as doublets (by scrublet/v0.2.3) (Wolock et al., Cell Syst 8, 281-291.e9 (2019)). or from doublet-derived sub-clusters were filtered out. The downstream dimension reduction and clustering analysis were done by Seurat/v4.0.2 (Hao et al., Cell 184, 3573-3587.e29 (2021)). Briefly, the dimensionality of the data was reduced by PCA (30 components) first and then with UMAP, followed by Louvain clustering. Clusters were assigned to known cell types based on cell type-specific markers (Table 7).

TABLE 7
Main cell types annotated in TrackerSci-
RNA and TrackerSci-ATAC

| | Gene markers supporting |
|---|---|
| Main cell type annotation | annotation |
| Astrocytes | Aqp4, Aldh1l1 |
| Cerebellum granule neurons | Gabra6, Fat2 |
| Choroid plexus epithelial cells | Ttr, Tmem72 |
| Committed oligodendrocytes precursors | Bmp4, Bcas1 |
| Dentate gyrus neuroblasts | Sema3c, Igfbpl1 |
| Ependymal cells | Foxj1, Ccdc153 |
| Erythroblasts | Hbb-bt, Hba-a1, Gypa |
| Immune cells | Ptprc |
| Mature neurons | Syt1 |
| Microglia | C1qb, P2ry12, Tmem119 |
| Myelin forming oligodendrocytes | Mog, Mag |
| Neuronal progenitor cells | Egfr, Mki67, Ascl1 |
| Olfactory bulb inhibitory neurons | Dlx6, Gng4 |
| Olfactory bulb neuroblasts | Dlx6, Prokr2, Robo2 |
| Oligodendrocytes progenitor cells | Pdgfra, Lhfpl3 |
| Vascular cells | Fn1, Vtn |

[0597] Differentially expressed genes across different cell types were identified using monocle2 (Qui et al., Nat. Methods 14, 979-982 (2017)) with the differentialGeneTest( ) function. Genes detected in less than 10 cells were filtered out before the analysis. To identify cell type-specific gene markers, genes were selected that were differentially expressed across different cell types (5% FDR, likelihood ratio test), with FC>2 between the target cell type and the second highest expressed cell type, and with maximum transcripts per million (TPM)>10 in the target cell types.

### Cell Filtering, Clustering, and Annotation for TrackerSci ATAC

[0598] Single-cell ATAC-seq profiles were generated as described above. EdU+ cells and global cells are combined and analyzed together. Cells with less than 1000 fragments and less than 0.2 promoter ratio were discarded. Dimensionality reduction for ATAC-seq data was performed using the snapATAC/v1.0.0 (Fang et al., Nat. Commun. 12, 1337 (2021)). A cell-by-bin matrix at 5-kb resolution was used. There was focus on bins on chromosomes 1-19, X and Y. High-coverage bins (top 5% bins that overlap with invariant features) or low-coverage bins (bottom 5% bins that represent general inaccessible regions) were filtered out before the analysis. Diffusion maps dimensionality reduction was performed on the filtered cell-by-bin matrix after binarization. UMAP analyses were performed on the top 20 eigenvectors, followed by unsupervised clustering via the densityPeak algorithm implemented in R package densityClust/v0.3 (Rodriguez et al., Science 344, 1492-1496 (2014)).

[0599] Integration analysis was performed between the TrackerSci-RNA dataset and TrackerSci-ATAC dataset to annotate the ATAC dataset. The gene activity score for ATAC cells was computed using the snapATAC function createGmatFromMat( ) by summing up the counts of bins overlapping with the gene body. A Seurat object was generated using the gene activity matrix and previously calculated diffusion map embeddings for single cell ATAC-seq. Then, variable genes were identified from TrackerSci-RNA data and used for identifying anchors between these two modalities. Next, the RNA-seq and ATAC-seq profiles were co-embedded in the same low-dimensional space to visualize all the cells together. Overlapped RNA clusters were used to annotate ATAC cells in the integrated UMAP space. ATAC cells without overlapped RNA cells were removed with careful inspection since they usually represent potential doublets or low-quality cells. Finally, single-cell ATAC dimension reduction, clustering, and integration analysis were rerun on the remaining dataset following the same procedure.

### Peak Calling and Identifications of Cell-Type-Specific Peaks

[0600] To define peaks of accessibility across all sites, MACS2/v2.1.1 (Zhang et al., Genome Biol. 9, R137 (2008)) was used. Nonduplicate ATAC-seq reads of cells from each main cell type were aggregated, and peaks were called on each group separately with these parameters: --nomodel --extsize 200 --shift -100 -q 0.1. Peak summits were extended by 250 bp on either side and then merged with bedtools/v2.30.0 (Zhang et al., Genome Biol. 9, R137 (2008); Quinlan et al., Bioinformatics 26, 841-842 (2010)), together with gene promoter regions (annotated transcription start site (TSS) in GENCODE VM27 minus/plus 1000 base pairs in a strand-specific manner). Each read alignment was extended by 100 bp upstream and downstream from the insertion site of tagmentation. Cells were determined to be accessible at a given peak if a read from a cell overlapped with the peak. The peak count matrix was generated by a custom python script with the HTseq package (Anders et al., Bioinformatics 31, 166-169 (2015); Zhang et al., Genome Biol. 9, R137 (2008); Quinlan et al., Bioinformatics 26, 841-842 (2010)). Differentially accessible peaks across cell types were identified using monocle 2 (Qiu, X. et al., Nat. Methods 14, 979-982 (2017)) with the differentialGeneTest( ) function. Peaks detected in less than 10 cells were filtered out before the analysis. To determine cell-type-specific peak markers, peaks that were selected were ones that were differentially accessible across different cell types (5% FDR, likelihood ratio test), with FC>2 between the target cell type and the second highest expressed cell type, and with TPM>10 in the target cell types.

### Analysis for Linking Cis-Regulatory Elements (CRE) to Regulated Genes

[0601] Links between chromatin accessible sites and regulated genes based on their covariance are identified. Only EdU+ cells were kept in this analysis. Pseudo-cells were first constructed by aggregating the RNA-seq and ATAC-seq profile of highly similar cells through k-means clustering the integrative UMAP coordinates. The k was selected so that the average cell number per subcluster is 150. Subclusters overrepresented by one molecular layer (the percentage of cells from either RNA-seq or ATAC-seq profile greater than ninety percent) were merged with a nearby subcluster. After aggregating cells within each sub-cluster, a total of 88 pseudo-cells were obtained, with a median of 54 cells from RNA-seq profile and 93 cells from ATAC-seq profile. Aggregated count matrices for RNA-seq and ATAC-seq were normalized to transcripts per million (TPM) and log 1p transformed. Genes and peaks with TPM value greater than 10 in the maximum expressed pseudo-cells were retained. Then, for each gene, the Pearson Correlation Coefficient (PCC) between its gene expression and the chromatin accessibility of its nearby accessible sites (minus/plus 500 kb from the TSS) across pseudo-cells was calculated. Sites overlapping with minus/plus 1 kb from the TSS were considered promoters, while the rest were considered distal regions. To define a threshold at PCC score, a set of background pairs were generated by permuting the pseudo cell id of the ATAC-seq matrix and with an empirically defined significance threshold of FDR<0.05, to select significant positively correlated cCRE-gene pairs. The linkage was further filtered by requiring that either the maximum expressed cell types in the RNA profile and the ATAC profile were the same or the top two or top three highest expressed cell types were in the same cell trajectory (Oligodendrogenesis trajectory: OPC, COP, OLG; Astrocytes trajectory: ASC, NPC; DG neurogenesis trajectory: NPC, DGNB; OB neurogenesis trajectory: NPC, OBNB, OBIN). Finally, only the one top linked gene with the highest PCC for each peak was kept.

### Transcription Factor Analysis

[0602] To identify key TF regulators of each main cell type, there was a search for TF that can be validated in two molecular layers by correlating gene expression and motif accessibility. First, using the TrackerSci-ATAC dataset, the top 300 sites per main cell type were selected (from the differential peak analysis described above, filtered by q-value<0.05, maximum expressed TPM>10 and ranked by FC between the highest and the second expressed cell type) to a combined peak set. The peaks were then resized to a fixed length of 500 bp (±250 bp around the center) and a binarized peak-by-motif matrix was generated using the R package motifmatchr/v1.16.0 (github.com/GreenleafLab/motifmatchr) with the matchMotifs( ) function to identify the occurrences of motifs in each peak from a filtered collection of the cisBP motif database curated by chromVARmotifs (Weirauch et al., Cell 158, 1431-1443 (2014); Schep et al., Nat. Methods 14, 975-978 (2017)). A matrix of motif-by-cell counts was obtained by multiplying the peak-by-cell matrix with the peak-by-motif matrix, and was aggregated into pseudo-cells based on the k-means clustering described before. The PCC between the scaled TF motif accessibility and the scaled TF gene expression across pseudo-cells was then computed. To select significantly positive and negative correlations of TF gene expression and motif accessibility pairs, the pseudo cell id of the motif-by-cell matrix was permuted to compute a background PCC distribution and selected the TF pairs with an empirically defined significance threshold of FDR<0.05. In addition, only TF with TPM>10 in the maximum expressed cell type was kept.

### Trajectory Analysis

[0603] Cells corresponding to the neurogenesis trajectory (ASC, NPC, DGNB, OBNB and OBIN) or the oligodendrogenesis trajectory (OPC, COP and OLG) from both RNA-seq data and ATAC-seq data were selected for detailed investigation. UMAP dimension reduction at the trajectory level was performed using the integration function from Seurat (Hao et al., Cell 184, 3573-3587.e29 (2021)), using the top 3,000 highly variable genes and top 50 PCs. Each cell was assigned a pseudotime value based on its position along the trajectory using monocle 2 function order_cells( ). RNA velocity analyses were performed using scVelo/v0.2.3 (Bergen et al., Nat. Biotechnol. 38, 1408-1414 (2020)) using the exonic and intronic gene count matrix generated from sciRNA pipeline to validate the cell differentiation direction and estimate the position of the progenitor cell state. For the two neurogenesis trajectories (DG neurogenesis and OB neurogenesis), pseudotime assignment was calculated separately and scaled so that the cells shared between two trajectories received the same pseudotime value. Specifically, the pseudotime value calculated from the OB trajectory was used for common progenitor cells in both DG and OB trajectories. A linear regression line was fitted using R function lm( ) to predict the OB-pseudotime based on the DG-pseudotime. Then, for cells unique to the DG neurogenesis, their pseudotime was adjusted using the predict( ) function using DG-pseudotime as input. Gene expression and peak accessibility dynamics along pseudotime were identified using monocle 2 (Qiu, X. et al., Nat. Methods 14, 979-982 (2017)) with the differentialGeneTest( ) function with pseudotime values and their main cluster identity as variables. Genes or peaks that passed a significant test (FDR of 5%) were considered as dynamically regulated genes or sites. Furthermore, differential accessible sites along pseudotime were used to infer TF motif accessibility dynamics. A motif deviation score for each single cell was computed using chromVar/v1.4.1 (Schep et al., Nat. Methods 14, 975-978 (2017)) with the dynamic peak set (resized to 500 bp) as input. Then, the motif deviation scores of each single cell were rescaled to (0, 10) using R function rescale( ) and differential accessible motifs were identified using monocle 2 with the differentialGeneTest( ) function. TF motifs that passed a significant test (FDR of 5%) were considered as dynamically regulated motifs. For gene enrichment analysis the enrichR (Chen et al., BMC Bioinformatics 14, 128 (2013)) was used and the following pathways collections were considered: Panther_2016, Reactome_2016, KEGG_2019_Mouse, GO_Biological_Process_2018, GO_Molecular_Function_2018. For visualizing the dynamics of gene expression, peak accessibility and motif accessibility, R package ComplexHeatmap/v2.10.0 (Gu et al., Bioinformatics 32, 2847-2849 (2016)) was used.

### Cell Proportion Analysis

[0604] To quantify the cell-type-specific changes in the proliferation dynamics across conditions, the fraction of each cell type within EdU+ population from each condition for RNA-seq data and ATAC-seq data separately was calculated, which was further multiplied by the median of EdU+ ratio for each group obtained from FACS sorting. For Adult WT mice, only those that were harvested 24 h after five-day labeling were included to avoid artifacts introduced by the labeling time.

[0605] To quantify the effects of ageing on cell differentiation dynamics along neurogenesis and oligodendrogenesis trajectories, miloR/v1.3.1 (Dann et al., Nat. Biotechnol. (2021), doi:10.1038/s41587-021-01033-z) was applied, a single-cell differential abundance testing framework using k-nearest neighbor (KNN) graphs. The KNN graph was first constructed on the UMAP space for each trajectory using the buildGraph( ) function with k=120 for the neurogenesis trajectory and k=250 for the oligodendrogenesis trajectory. Cell neighborhoods were then defined using the makeNhoods( ) function and the number of cells from each experiment sample were counted for each neighborhood using the countCells( ) function. Testing for differential abundance in neighborhoods was performed using the testNhoods( ) function and significance levels for Spatial FDR of 0.05 were used. Visualization of differential abundance neighborhoods was done using the plotNhoodGraphDA( ) function.

### Differential Analysis of NPC and OPC Across Aged Groups

[0606] Differential gene expression analysis across young, adult, and aged groups of NPC and OPC was performed using monocle 2 (Qiu, X. et al., Nat. Methods 14, 979-982 (2017)) function differentialGeneTest( ) with the number of genes detected per cell included as a covariant. For Adult WT mice, only cells from the animals harvested at 24 h after 5-day labeling were included to avoid artifacts introduced by the labeling time. In addition, only differentially expressed genes (>expressed in more than 10 cells) along the neurogenesis or the oligodendrogenesis trajectory were included in the differential gene test. Differentially expressed genes were selected by a q-value cutoff of 0.1, a TPM cutoff of 50 in the maximum expressed group, and with at least 1.5 FC between the maximum expressed group and the minimum expressed group. Next, differentially expressed genes were grouped to aged-depleted genes and aged-enriched genes by the following criteria: for ageing-depleted genes, the genes with minimum expression in aged mice were first selected, and only those with either maximum expression in young mice or within less than 2 FC between the young group and the adult group were kept. For ageing-enriched genes, the genes with maximum expression in aged mice were first selected, and only those with either minimum expression in young mice or with less than 2 FC between the young group and the adult group were kept. The DE genes were further filtered based on the consistency on their promoters or linked sites. For ageing-depleted genes, there was a requirement that the mean of promoter accessibility or linked site accessibility was at the minimum level in the aged group compared to young and adults. For ageing-enriched genes, there was a requirement that the mean of promoter accessibility or the linked site accessibility was at the maximum level in the aged group compared to young and adults. Genes that were lowly detected in both promoter accessibility and linked sites (represented by the mean of TPM<10 in all conditions) were also discarded.

### Integration Analysis Between TrackerSci-RNA and EasySci-RNA

[0607] Integration analysis of scRNA-seq dataset profiled using TrackerSci and Easy Sci was performed using Seurat/v4.0.2 (Hao et al., Cell 184, 3573-3587.e29 (2021)). 14,095 TrackerSci-RNA cells (including 5,715 EdU+ cells and 8,380 all brain cells without EdU enrichment) were integrated with 126,285 EasySci-RNA cells (up to 5,000 cells randomly sampled from each of 31 cell types) in the companion study (Cao et al., Science 370, 924-925 (2020)). Shared variable genes, selected by SelectIntegrationFeatures( ) function, were used for identifying anchors using FindIntegrationAnchors( ). The two datasets were then integrated together with IntegrateData( ) function. To visualize all the cells together, all the cells were co-embedded in the same low-dimensional space. The same integrative analysis strategy was further applied to cells matching the same cellular state from both datasets. Specifically, for the neurogenesis trajectory, 1,214 EdU+ cells from TrackerSci-RNA (NPC, OBNB, and OBIN) were integrated with 37,258 OB neurons-1 cells from EasySci-RNA. For the oligodendrogenesis trajectory, 3,044 EdU+ cells from TrackerSci-RNA (OPC and COP) were integrated to 22,718 Oligodendrocyte progenitor cells from EasySci-RNA. For the microglia, 600 EdU+ microglia from TrackerSci-RNA were integrated to 15,754 Microglia from EasySci-RNA. Microglia subclusters corresponding to peripheral immune cells were excluded before the analysis.

### Quantifications of the Self-Renewal Potential and the Differentiation Potential

[0608] The self-renewal potential was defined as the ratio of newly generated progenitor cells within 5 days of EdU labeling divided by the ratio of total progenitor cells detected from the global population. To account for potential variations due to slight differences of animal ages between TrackerSci and the brain cell atlas, a linear model between the ages and the ratio of progenitor cells was first fitted using the EasySci data for the following cell type: neuronal progenitor cells, oligodendrocyte progenitor cells, and microglia. That was used to predict the ratio of progenitor cells for each individual mice profiled by TrackerSci. The ratio of newly generated progenitor cells from each 5-day labeled mice was then divided by the predicted cellular fraction of the global progenitor pool for the same cell type. A line plot was generated using the median values of proliferation potential for each aged group normalized to the young mice. RNA and ATAC cells were both included, and samples with less than 50 cells were excluded from the calculation.

[0609] The differentiation potential was quantified by the ratio of differentiated cells divided by all EdU+ cells in the same trajectory. Such a ratio was calculated only for oligodendrogenesis trajectory since it's a unidirectional route. For this analysis, the ratio of committed oligodendrocytes and myelin-forming oligodendrocytes was divided to the ratio of oligodendrocytes progenitor cells for each sample and median values of each age group were used to generate the line plot. RNA and ATAC cells were included, and samples with less than 50 cells were excluded from the calculation.

[0610] The Experimental Results are now described.

### a Global View of Rare Newborn Cells Across the Mammalian Brain

[0611] TrackerSci was applied to capture rare newborn cells from entire mouse brains spanning three age stages and two genotypes. Briefly, following three to five days of continuous EdU labeling, nuclei of the whole brain from thirty-eight sex-balanced C57BL/6 mice were isolated (FIG. 20a), including thirty-three wild-type mice across multiple development stages (Young: 6-9 weeks, Adult: 11-20 weeks, and Aged: 88-98 weeks) as well as five 5×FAD mutant mice (11-20 weeks) harboring multiple Alzheimer's Disease mutations¹³. Following TrackerSci protocol, transcriptomic profiles for 5,715 newborn cells (median 2,909 UMIs) (FIG. 25a,b) and chromatin accessibility profiles for 8,974 newborn cells (median 50,225 unique reads) (FIG. 26a,b) were obtained. In addition, to characterize the global brain cell population as a background control, DAPI singlets representing ‘all’ brain cells were included (i.e., without enrichment of the EdU+ cells) and transcriptomic profiles for 8,380 nuclei (median 1,553 UMIs) and chromatin accessibility profiles for 342 nuclei (median 24,521 unique reads) were obtained. The EdU+ nuclei and DAPI singlets were collected from the same set of samples and processed in parallel to minimize any batch effect.

[0612] The 14, 129 TrackerSci transcriptome profiles, including both EdU+ nuclei and DAPI singlets, were subjected to Louvain clustering (Blondel et al., Journal of Statistical Mechanics: Theory and Experiment vol. 2008 P10008 (2008)) and UMAP visualization (McInnes et al., Journal of Open Source Software vol. 3 861 (2018)) (FIG. 25c). Sixteen cell clusters were identified and annotated based on established markers (FIG. 25d), ranging in size from 25 cells (Choroid plexus epithelial cells) to 3,134 cells (Mature neurons). A semi-supervised clustering analysis of 9,316 TrackerSci chromatin accessibility profiles was performed (8,974 EdU+ nuclei and 342 DAPI singlets), and fourteen clusters (FIG. 26c,d) was identified, which mapped 1:1 to the main cell types identified in the transcriptome analysis. As expected, the corresponding cell types defined by the two layers overlapped well in the integration analysis (FIG. 20b). Two rare cell types (i.e., ependymal cells and choroid plexus epithelial cells) were only detected in the RNA dataset, potentially due to the low abundance of these cell types.

[0613] While EdU+ nuclei from replicate mouse brain groups were similarly distributed (FIG. 25e, FIG. 26e), a notably altered distribution of cell-type-specific fractions between ‘all’ brain cells and the EdU+ cells was observed (FIG. 20d). For example, in contrast to the ‘all’ brain cells that are dominated by mature neurons (e.g., cerebellum granule neurons: 32.7% in DAPI singlets vs. 2.85% in EdU+ cells) and differentiated glial cells (e.g., myelin-forming oligodendrocytes: 11.9% in DAPI singlets vs. 0.75% in EdU+ cells), the EdU+ population showed prominent enrichment of progenitor cells such as immature neurons (e.g., Olfactory bulb neuroblasts: 0.14% in DAPI singlets vs. 13.4% in EdU+ cells) and glia progenitors (e.g., oligodendrocyte progenitor cells: 1.11% in DAPI singlets vs. 45.4% in EdU+ cells). Intriguingly, newly-generated erythroblasts (Hbb-bt+, Hbb-bs+) and immune cells (Ptprc+) were detected, which may correspond to newborn blood cells circulating in the brain, as they exclusively exist in the EdU+ nuclei. Of note, the cell-type-specific distribution of newborn cells was highly correlated between TrackerSci transcriptome and chromatin accessibility datasets (mean Spearman's correlation r=0.92; FIG. 20e) and across conditions (FIG. 27).

[0614] TrackerSci datasets were integrated with a global brain cell atlas from a companion study (Cao et al., Science 370, 924-925 (2020)), for which 1.5 million cells from entire mouse brains spanning three age groups and two mutants associated with Alzheimer's disease were profiled. Briefly, EdU+ brain cells (5,715 single-cell transcriptomes from TrackerSci), ‘All’ brain cells (8,380 DAPI singlets from TrackerSci), and “All” brain cells from the global brain cell atlas (sampling 5000 cells for each main cell type) were integrated into the same UMAP space. As expected, ‘All’ brain cells from the TrackerSci highly overlapped with ‘All’ brain cells from the global brain cell atlas in the integrated UMAP space (FIG. 20f). Remarkably, with the assistance of EdU+ cells profiled from TrackerSci, continuous cellular differentiation trajectories bridging several terminally differentiated cell types were formed, including the oligodendrogenesis trajectory from the oligodendrocyte progenitor cells to differentiated oligodendrocytes, and the neurogenesis trajectory connecting astrocytes and OB neurons (FIG. 20f). While the 1.5 million global brain cell atlas is one of the most extensive single-cell analysis of adult mouse brains, these “bridge” cells were still missing in the trajectory analysis (FIG. 28), highlighting the importance of the TrackerSci method in the characterization of extremely rare proliferating/differentiating cells to reconstruct continuous differentiation trajectory of cells.

### Transcriptional and Epigenetic Signatures of Newborn Cells

[0615] Toward a better understanding of the molecular signatures of newborn cells, differential expression (DE) and differential accessibility (DA) analysis was performed, yielding 5,610 DE genes (FDR of 5%, FIG. 29a) and 68,556 DA sites (FDR of 5) with significant changes across cell types. 1,744 (34.8%) of DE genes have DA promoters enriched in the same cell type (median Pearson rho=0.81, FIG. 29a). While canonical gene markers were observed and used for the annotation analysis (FIG. 30), many novel markers that are highly cell-type-specific but have not been reported in prior research were detected (FIG. 30), including markers for neuronal progenitor cells (e.g., Adgrv1 and Rmi2), DG neuroblasts (e.g., Prdm8 and Marchf4), OB neuroblasts (e.g., Zfp618 and Sdk2) and committed oligodendrocyte precursors (e.g., Ccdc134 and Mroh3). These markers were cross-validated by cell-type-specific gene expression and promoter accessibility. Of note, some of the widely used neurogenesis markers, such as Sox2 and Dcx (Hodge et al., Dev. Neurobiol. 71, 680-689 (2011)), were expressed across multiple cell types (e.g., oligodendrocyte progenitor cells; FIG. 31), which may lead to the limited accuracy in capturing cells undergoing neurogenesis.

[0616] To investigate the epigenetic landscape that shapes the gene expression of newborn cells, the cis-regulatory elements were linked to the expression of putative target genes based on their covariance across different cell states. the correlation between the expression of each gene and the accessibility of its nearby DA sites across 88 ‘pseudo-cells’ was computed (a subset of cells with adjacent integrative UMAP coordinates grouped by k-means clustering, FIG. 32a). To control for artifacts of the analysis, the sample IDs of the chromatin accessibility matrix was permuted and the same analysis was performed. Altogether, 15,485 positive links between genes and distal sites (plus 2,832 associations between genes and promoters) were identified at an empirically defined significance threshold of FDR=0.05 and based on their cell-type-specificity (FIG. 29b).

[0617] The identified distal site-gene linkages were significantly closer than all possible pairs tested (median 159 kb for identified links vs. 251 kb for all pairs tested; P-value<5×10⁻⁵, unpaired permutation test based on 20,000 simulations, FIG. 32b). Most genes were associated with a few links (median two distal sites per gene, out of a median of 94 distal sites within 500 kb of the TSS tested, FIG. 32b). For example, Dlx2, a canonical neurogenesis marker, was significantly linked to four distal peaks, all exhibiting remarkable cell-type-specificity similar to its gene expression and promoter accessibility (FIG. 29d, FIG. 32c). By contrast, a small subset of genes (3.5%) were linked with a large number of peaks (>=10 peaks). One such example is Olig2, an oligodendrogenesis marker, which was linked with 10 distal peaks (FIG. 29d), all highly enriched in the oligodendrocytes progenitor cells (OPC) and committed oligodendrocytes precursors (COP) (FIG. 29e, FIG. 32d). For some genes (e.g., Dlx2), the linked distal sites showed stronger cell-type-specificity compared to their promoters (FIG. 32e), suggesting the long-range transcriptional control could play a critical role in the cell-type-specificity of newborn brain cells.

[0618] Transcription factors (TFs) determining the cell type specificity of newborn cells were systematically characterized. The occurrence of each TF motif within cell-type-specific accessible sites was first quantified and the Pearson correlation coefficient between TF expression and motif accessibility across all afore-described “pseudo-cells” was computed. Meanwhile, the same analysis was performed using the permuted data as a background control. With this approach, 51 potential TF activators with positively correlated gene expression and motif accessibility were identified (e.g., Dlx2, FIG. 29f), and 19 TF repressors showed negative correlations between gene expression and motif accessibility (e.g., Oligo2, FIG. 29f). In fact, Oligo2 has been reported to encode a transcriptional repressor during motor neuron differentiation and myelinogenesis (Zhang et al., Nat. Commun. 13, 1423 (2022)). In addition, most top enriched cell-type-specific TFs can be validated by previous studies, such as Spi1 and Runx1 in microglia and other immune cells (Yeh et al., Trends Mol. Med. 25, 96-111 (2019); Iwasaki et al., Immunity 26, 726-740 (2007)); Maf, Mef2a, and Tfe3 in microglia only (Yeh et al., Trends Mol. Med. 25, 96-111 (2019); Solé-Domènech et al., Ageing Res. Rev. 32, 89-103 (2016)); and Pax6, Nfib, and Arx in neuronal progenitor cells and neuroblasts (Osumi et al., Stem Cells 26, 1663-1672 (2008); Ninkovic et al., Cell Stem Cell 13, 403-418 (2013); Colombo et al., Journal of Neuroscience vol. 27 4786-4798 (2007)). Notably, several less-characterized TF regulators showing strong enrichment in certain cell types were identified, such as Zfx in microglia, Pou6f1, Hmbox1, Klf8, and Smarcc1 in immature neurons (FIG. 29g, FIG. 33), validated by both gene expression and motif accessibility.

### a Highly Heterogeneous Cell Response to Ageing Across Newborn Brain Cells

[0619] Through comparing the fraction of EdU+ cells across young, adult, and aged brains, as expected, a significant reduction of newborn brain cells was observed over time, indicating a globally reduced proliferation behavior upon ageing (FIG. 34a). To further investigate the cell-type-specific response in ageing, the relative fraction of each newborn cell type was quantified by their fractions in the EdU labeled cell population, multiplied by the ratio of all EdU+ cells in the global cell population. Interestingly, a highly heterogeneous cell response to ageing was detected across various newborn cell types. For example, while most cell types exhibited reduced proliferation upon ageing, microglia and other immune cells showed a remarkable boost in the fraction of newborn cells (FIG. 34b-d). This is consistent with the elevated inflammatory responses in the aged brain (Corlier et al., Neuroimage 172, 118-129 (2018)). In addition, even those cell types with decreased proliferation still present to varying degrees. For example, one of the most altered cell types in ageing, dentate gyrus neuroblasts, showed an 18-fold reduction in the aged brain (vs. adult brain), while the proliferation rate of vascular cells was only mildly affected. Of note, the cell-type-specific response to ageing was validated by both single-cell transcriptome and chromatin accessibility profiles (FIG. 34b).

[0620] Similar to ageing-induced changes, highly heterogeneous cell-type-specific responses to AD-associated genetic perturbations was detected in the 5×FAD mice, even though they were profiled at a relatively early stage (before 20 weeks). For example, several cell types already exhibited concordant ageing-associated changes, such as the expansion of microglia and the reduction of newborn DG neuroblasts, astrocytes, and cerebellum granule neurons (FIG. 34c), suggesting the alteration of cell-type-specific proliferation status is earlier than phenotypical observations and can be used as early markers of Alzheimer's disease.

[0621] To further validate the cell-type-specific dynamics in ageing, the newborn cells recovered from TrackerSci and the global brain cell atlas (in the companion study) were integrated for sub-clustering analysis. Indeed, the integration analysis at the sub-cluster level facilitated identifying and annotating rare progenitor cells in the brain cell atlas. These include neuronal progenitor cells (marked by Mki67, Top2a, and Egfr) and committed oligodendrocyte precursors (marked by high expression of Bmp4 and Bcas1) (FIG. 34e), both of which are remarkably down-regulated over time in both TrackerSci and the global brain cell atlas. In addition, the integration analysis revealed a reactive microglia subtype, marked by high expression of Apoe and Csf1 in both datasets. This microglia subtype has been previously reported to be enriched in both aged and AD mammalian brains (Keren-Shaul et al., Cell vol. 169 1276-1290.e17 (2017)). As expected, the proliferation of the Apoe+, Csf1+ microglia increased dramatically in both aged and 5×FAD brains, consistent with the cell-type-specific changes in the global cell population.

[0622] How ageing impacts the self-renewal and differential potential of brain progenitor cells was then quantitatively investigated. First, the self-renewal potential can be calculated as the ratio of newly generated progenitor cells divided by the ratio of total progenitor cells detected from the global population (i.e., the number of newborn cells generated per progenitor cell in a fixed time). For example, a significantly reduced self-renewal potential of neuronal progenitor cells was detected (FIG. 34h), which explained the depleted neural stem cell pool in aged brains. Meanwhile, the differentiation potential of cell types can be defined by the ratio of newly generated differentiated cells divided by all newborn cells in the same trajectory (FIG. 34g). For example, a substantial reduction of the differentiation potential in oligodendrocyte progenitor cells over time was observed, suggesting its differentiation process is severely blocked across the lifespan (FIG. 34h). This analysis represents the first quantitative measurement of cell-type-specific self-renewal and differentiation capacities in vivo.

### The Impact of Ageing on Adult Neurogenesis

[0623] Adult neurogenesis and oligodendrogenesis have been reported to decline upon ageing (Polina et al., Oncogene 30, 3105-3126 (2011); Galvan et al., Clin. Interv. Aging 2, 605-610 (2007)); however, the detailed mechanism is still unclear due to technical limitations. The impact of ageing on adult neurogenesis and oligodendrogenesis was interrogated, and the transcriptional and epigenetic controls underlying cell-type-specific proliferation and differentiation dynamics was delineated.

[0624] For adult neurogenesis, three main trajectories that differentiated into DG neuroblasts, OB neuroblasts, and astrocytes were identified, consistent with the cell state transition directions inferred by the RNA velocity analysis (Bergen et al., Nat. Biotechnol. 38, 1408-1414 (2020)) and prior report (Ratz et al., Nat. Neurosci. 25, 285-294 (2022)) (FIG. 35a). The trajectory was further validated through a pulse-chase experiment, where cells were harvested for TrackerSci profiling at different time points (i.e., one day, three days, and nine days post-labeling). Indeed, a gradual accumulation of more differentiated cell states with longer chasing time was observed (FIG. 36). Through differentially expressed gene analysis, 2,072 and 6,473 DE genes along the DG neurogenesis and OB neurogenesis trajectories, respectively were identified. Of all DE genes, 1,799 genes were shared between the two trajectories, including up-regulated genes (e.g., Dcx) enriched in neuron development (q-value=2.721e-8) (Chen et al., BMC Bioinformatics 14, 128 (2013)) and down-regulated genes (e.g., Notum) enriched in negative Wnt signaling regulation (q-value=0.0004) (Chen et al., BMC Bioinformatics 14, 128 (2013)) (FIG. 37a). In addition, putative trajectory- and region-specific neurogenesis programs were identified, such as transcriptional factors Neurod1, Neurod2, and Emx1 in the DG trajectory (FIG. 37b). This is consistent with previous reports about their important roles in hippocampal neurogenesis (Brulet et al., Exp. Neurol. 293, 190-198 (2017); Hong et al., Exp. Neurol. 206, 24-32 (2007); Micheli et al., Front. Cell. Neurosci. 11, 186 (2017)) (FIG. 35b).

[0625] With the chromatin accessibility profiling, 3,095 and 13,790 sites showing dynamics patterns along the DG neurogenesis and OB neurogenesis trajectories were identified, respectively, from which 20 TFs exhibiting significantly changed motif accessibility in the DG neurogenesis trajectory (FDR of 0.05, Table 8) and 318 TFs in OB neurogenesis (FDR of 0.05, Table 9) were further identified. Key TFs were further validated by strong correlations between their expression and motif accessibility dynamics. For example, the expression of the above-mentioned neurogenesis regulators, Neurod1 and Neurod2, are positively correlated with their motif accessibility. In contrast, Mytl1, a known repressor of neural differentiation (Mall et al., Nature 544, 245-249 (2017)), shows a negatively correlated gene expression and motif accessibility. Leveraging this approach, TFs shared between two neurogenesis trajectories were identified (e.g., Mytl1, Ascl1, and E2f7); many of them have been known to regulate the specification of different neuron types (e.g., Dlx6, Sp8, Sp9 uniquely enriched in OB neurogenesis (Li et al., Cereb. Cortex 28, 3278-3294 (2018); Diaz-Guerra et al., Anat. Rec. 296, 1364-1382 (2013)). Meanwhile, several TFs (e.g., Irf2, Stat2, and Etv6) that show strong enrichment of both gene expression and motif accessibility in neuronal progenitor cells were identified, but their functions in neurogenesis were less-characterized in prior studies. Interestingly, these factors have been previously identified as essential regulators of other stem cell types, such as colonic stem cells (Irf2) (Minamide et al., Sci. Rep. 10, 14639 (2020)), mesenchymal stem cells (Stat2) (Yi et al., Gene 497, 131-139 (2012)), and hematopoietic stem cells (Etv6) (Yi et al., Gene 497, 131-139 (2012); Hock et al., Genes Dev. 18, 2336-2341 (2004)). The data suggest their potential roles in maintaining the proliferation status of neuronal progenitor cells in the brain.

TABLE 8
Differential accessible TF binding motifs along
pseudotime in the DG neurogenesis trajectory.

| TF | motif_ID | pval | qval |
|---|---|---|---|
| ‘Twist2’ | ENSMUSG00000007805_LINE47_Twist2_D | 0.000237248 | 0.017433712 |
| ‘Msc’ | ENSMUSG00000025930_LINE83_Msc_D | 3.10E−09 | 2.73E−06 |
| ‘Myog’ | ENSMUSG00000026459_LINE85_Myog_D | 0.000819361 | 0.037949347 |
| ‘Neurog2’ | ENSMUSG00000027967_LINE90_Neurog2_I | 0.000483329 | 0.025019409 |
| ‘Scx’ | ENSMUSG00000034161_LINE113_Scx_I | 0.000257543 | 0.017433712 |
| ‘Atoh8’ | ENSMUSG00000037621_LINE124_Atoh8_I | 0.000303842 | 0.017825377 |
| ‘Neurod2’ | ENSMUSG00000038255_LINE127_Neurod2_I | 0.000956182 | 0.042072011 |
| ‘Olig2’ | ENSMUSG00000039830_LINE130_Olig2_I | 0.000775629 | 0.037919642 |
| ‘Neurog3’ | ENSMUSG00000044312_LINE135_Neurog3_I | 0.000483329 | 0.025019409 |
| ‘Olig1’ | ENSMUSG00000046160_LINE142_Olig1_I | 1.23E−05 | 0.002349494 |
| ‘Nhlh2’ | ENSMUSG00000048540_LINE148_Nhlh2_D | 4.16E−05 | 0.004572436 |
| ‘Tcf15’ | ENSMUSG00000068079_LINE162_Tcf15_I | 0.000257543 | 0.017433712 |
| ‘Atoh1’ | ENSMUSG00000073043_LINE166_Atoh1_D_N2 | 1.87E−05 | 0.002349494 |
| ‘Scrt1’ | ENSMUSG00000048385_LINE563_Scrt1_I | 0.000295917 | 0.017825377 |
| ‘Myt11’ | ENSMUSG00000061911_LINE940_Myt11_I | 1.84E−05 | 0.002349494 |
| ‘Pknox2’ | ENSMUSG00000035934_LINE1297_Pknox2_D_N1 | 0.000138454 | 0.013537713 |
| ‘Tal2’ | ENSMUSG00000028417_LINE214_Tal2_I_N1 | 0.000237248 | 0.017433712 |
| ‘Neurod1’ | ENSMUSG00000034701_LINE292_Neurod1_I_N7 | 1.87E−05 | 0.002349494 |
| ‘Neurod6’ | ENSMUSG00000037984_LINE330_Neurod6_I_N7 | 1.87E−05 | 0.002349494 |
| ‘Neurod4’ | ENSMUSG00000048015_LINE422_Neurod4_I_N7 | 1.87E−05 | 0.002349494 |

TABLE 9
Differential accessible TF binding motifs along pseudotime in the OB neurogenesis trajectory.

| TF | motif_ID | pval | qval |
|---|---|---|---|
| ‘Arid3b’ | ENSMUSG00000004661_LINE10_Arid3b_D | 1.75E−07 | 2.28E−06 |
| ‘Arid3a’ | ENSMUSG00000019564_LINE13_Arid3a_D_N3 | 0.001193739 | 0.005458936 |
| ‘Arid2’ | ENSMUSG00000033237_LINE27_Arid2_I | 0.000221127 | 0.00132676 |
| ‘Hmga2’ | ENSMUSG00000056758_LINE31_Hmga2_D | 0.009923832 | 0.029771496 |
| ‘Phf21a’ | ENSMUSG00000058318_LINE32_Phf21a_D | 6.45E−05 | 0.000474661 |
| ‘Ascl2’ | ENSMUSG00000009248_LINE50_Ascl2_D_N2 | 0.001919928 | 0.007962054 |
| ‘Myod1’ | ENSMUSG00000009471_LINE51_Myod1_D | 3.44E−05 | 0.000267094 |
| ‘Myc’ | ENSMUSG00000022346_LINE75_Myc_D | 4.60E−05 | 0.000350852 |
| ‘Myog’ | ENSMUSG00000026459_LINE85_Myog_D | 2.47E−06 | 2.64E−05 |
| ‘Hes2’ | ENSMUSG00000028940_LINE94_Hes2_D | 0.006030904 | 0.019548448 |
| ‘Atoh8’ | ENSMUSG00000037621_LINE124_Atoh8_I | 0.002275804 | 0.009212105 |
| ‘Hes5’ | ENSMUSG00000048001_LINE146_Hes5_D | 0.006652318 | 0.021157371 |
| ‘Max’ | ENSMUSG00000059436_LINE156_Max_D_N3 | 0.004949497 | 0.017021441 |
| ‘Atf6b’ | ENSMUSG00000015461_LINE174_Atf6b_I | 0.010335065 | 0.030678825 |
| ‘Fos' | ENSMUSG00000021250_LINE181_Fos_I | 0.000184034 | 0.001179492 |
| ‘Atf6’ | ENSMUSG00000026663_LINE196_Atf6_I | 0.010335065 | 0.030678825 |
| ‘Fosl2’ | ENSMUSG00000029135_LINE202_Fosl2_D | 0.000485873 | 0.00258521 |
| ‘Junb’ | ENSMUSG00000052837_LINE241_Junb_D | 0.011535377 | 0.033263317 |
| ‘Dbp’ | ENSMUSG00000059824_LINE252_Dbp_D_N2 | 0.002570977 | 0.010259653 |
| ‘Bcl6b’ | ENSMUSG00000000317_LINE277_Bcl6b_D | 0.00517088 | 0.017639372 |
| ‘Klf5’ | ENSMUSG00000005148_LINE292_Klf5_I | 6.33E−07 | 7.65E−06 |
| ‘Sp2’ | ENSMUSG00000018678_LINE317_Sp2_I | 8.18E−13 | 2.66E−11 |
| ‘Plagl1’ | ENSMUSG00000019817_LINE320_Plagl1_D | 0.000553122 | 0.002853301 |
| ‘Patz1’ | ENSMUSG00000020453_LINE325_Patz1_I | 0.003054142 | 0.01169142 |
| ‘Yy1’ | ENSMUSG00000021264_LINE330_Yy1_I | 0.000897737 | 0.004219362 |
| ‘Zkscan3’ | ENSMUSG00000021327_LINE332_Zkscan3_I | 0.006382467 | 0.020452905 |
| ‘Zfp369’ | ENSMUSG00000021514_LINE335_Zfp369_I | 0.005734676 | 0.01889848 |
| ‘Sp4’ | ENSMUSG00000025323_LINE369_Sp4_D_N2 | 0.003467034 | 0.013094243 |
| ‘Zfp7l1’ | ENSMUSG00000025529_LINE371_Zfp7l1_D | 5.44E−09 | 1.07E−07 |
| ‘Zfp202’ | ENSMUSG00000025602_LINE372_Zfp202_D | 0.002180448 | 0.008998337 |
| ‘Gfilb’ | ENSMUSG00000026815_LINE378_Gfilb_D | 0.00020226 | 0.00124176 |
| ‘Mecom’ | ENSMUSG00000027684_LINE385_Mecom_D | 0.001431955 | 0.006438028 |
| ‘Zfp300’ | ENSMUSG00000031079_LINE417_Zfp300_D | 0.003131419 | 0.011933244 |
| ‘Prdm1’ | ENSMUSG00000038151_LINE465_Prdm1_I | 0.004506218 | 0.016017901 |
| ‘Egr1’ | ENSMUSG00000038418_LINE467_Egr1_D_N3 | 0.008495928 | 0.026136563 |
| ‘Zfp410’ | ENSMUSG00000042472_LINE500_Zfp410_D | 0.015901061 | 0.042570562 |
| ‘Zfp3’ | ENSMUSG00000043602_LINE511_Zfp3_D | 1.76E−08 | 3.04E−07 |
| ‘Scrt1’ | ENSMUSG00000048385_LINE563_Scrt1_I | 2.60E−15 | 2.00E−13 |
| ‘Osr1’ | ENSMUSG00000048387_LINE564_Osr1_D | 0.005298076 | 0.017857259 |
| ‘Sp8’ | ENSMUSG00000048562_LINE568_Sp8_I | 0.002710296 | 0.010615324 |
| ‘Zfa’ | ENSMUSG00000049576_LINE578_Zfa_I | 6.93E−13 | 2.35E−11 |
| ‘Zfp161’ | ENSMUSG00000049672_LINE583_Zfp161_D | 0.011590856 | 0.033263317 |
| ‘Zbtb12’ | ENSMUSG00000049823_LINE587_Zbtb12_D | 0.000545838 | 0.002833 |
| ‘Hic2’ | ENSMUSG00000050240_LINE593_Hic2_I | 0.000200899 | 0.00124176 |
| ‘Zfy1’ | ENSMUSG00000053211_LINE623_Zfy1_I | 6.93E−13 | 2.35E−11 |
| ‘Zkscan4’ | ENSMUSG00000054931_LINE639_Zkscan4_I | 0.006382467 | 0.020452905 |
| ‘Zkscan5’ | ENSMUSG00000055991_LINE656_Zkscan5_D | 0.009163526 | 0.027786177 |
| ‘Zfp105’ | ENSMUSG00000057895_LINE676_Zfp105_D | 1.59E−05 | 0.000140292 |
| ‘Zfp110’ | ENSMUSG00000058638_LINE686_Zfp110_I | 0.005734676 | 0.01889848 |
| ‘Sert2’ | ENSMUSG00000060257_LINE703_Scrt2_I | 1.64E−14 | 9.89E−13 |
| ‘Sp7’ | ENSMUSG00000060284_LINE704_Sp7_I | 0.002710296 | 0.010615324 |
| ‘Zscan20’ | ENSMUSG00000061894_LINE719_Zscan20_D | 0.008925802 | 0.027162694 |
| ‘Zfp238’ | ENSMUSG00000063659_LINE743_Zfp238_I | 3.76E−07 | 4.68E−06 |
| ‘Sp9’ | ENSMUSG00000068859_LINE776_Sp9_I | 0.002710296 | 0.010615324 |
| ‘Egr4’ | ENSMUSG00000071341_LINE808_Egr4_I | 0.001020857 | 0.004771522 |
| ‘Zfx’ | ENSMUSG00000079509_LINE916_Zfx_D_N1 | 0.000281608 | 0.00160973 |
| ‘Myt1l’ | ENSMUSG00000061911_LINE940_Myt1l_I | 3.84E−28 | 3.25E−25 |
| ‘Nfya’ | ENSMUSG00000023994_LINE941_Nfya_I | 0.000202557 | 0.00124176 |
| ‘Onecut3’ | ENSMUSG00000045518_LINE965_Onecut3_I | 0.006919946 | 0.021844308 |
| ‘E2f7’ | ENSMUSG00000020185_LINE992_E2f7_I | 0.013138346 | 0.036927044 |
| ‘E2f5’ | ENSMUSG00000027552_LINE994_E2f5_I | 4.73E−05 | 0.000353752 |
| ‘E2f6’ | ENSMUSG00000057469_LINE996_E2f6_I | 0.000756822 | 0.003700992 |
| ‘Sfpi1’ | ENSMUSG00000002111_LINE997_Sfpi1_D_N2 | 0.005785705 | 0.01889848 |
| ‘Elf3’ | ENSMUSG00000003051_LINE1001_Elf3_D_N2 | 0.002385466 | 0.009610019 |
| ‘Elk3’ | ENSMUSG00000008398_LINE1009_Elk3_D_N2 | 0.000641397 | 0.003237001 |
| ‘Gabpa’ | ENSMUSG00000008976_LINE1011_Gabpa_D_N3 | 0.011638229 | 0.033263317 |
| ‘Elkl’ | ENSMUSG00000009406_LINE1014_Elk1_D | 0.001277246 | 0.005778344 |
| ‘Ehf’ | ENSMUSG00000012350_LINE1015_Ehf_D_N2 | 0.003174436 | 0.012042926 |
| ‘Elk4’ | ENSMUSG00000026436_LINE1023_Elk4_D | 0.006588712 | 0.021034153 |
| ‘Elf5’ | ENSMUSG00000027186_LINE1024_Elf5_D_N2 | 0.001131234 | 0.005201217 |
| ‘Etv6’ | ENSMUSG00000030199_LINE1026_Etv6_D | 4.66E−05 | 0.000352175 |
| ‘Elf4’ | ENSMUSG00000031103_LINE1027_Elf4_D | 0.000215233 | 0.001308792 |
| ‘Elf2’ | ENSMUSG00000037174_LINE1031_Elf2_D | 0.001746859 | 0.007426346 |
| ‘Erg’ | ENSMUSG00000040732_LINE1032_Erg_D_N1 | 0.018022373 | 0.047946314 |
| ‘Fev’ | ENSMUSG00000055197_LINE1037_Fev_I | 0.002739658 | 0.010631882 |
| ‘LINE5773’ | XP_9117244_LINE5773_Gm4881_I_N36 | 0.011638229 | 0.033263317 |
| ‘Foxj1’ | ENSMUSG00000034227_LINE1061_Foxj1_D | 3.54E−09 | 7.14E−08 |
| ‘Foxo1’ | ENSMUSG00000044167_LINE1080_Foxo1_D_N2 | 0.012637312 | 0.035637221 |
| ‘Foxi1’ | ENSMUSG00000047861_LINE1083_Foxi1_I | 0.014760252 | 0.040151683 |
| ‘Foxi2’ | ENSMUSG00000048377_LINE1084_Foxi2_I | 0.014760252 | 0.040151683 |
| ‘Foxc1’ | ENSMUSG00000050295_LINE1086_Foxc1_D_N2 | 0.001627955 | 0.006991116 |
| ‘Foxi3’ | ENSMUSG00000055874_LINE1093_Foxi3_I | 0.014760252 | 0.040151683 |
| ‘Foxd3’ | ENSMUSG00000067261_LINE1101_Foxd3_I | 0.001483943 | 0.006438028 |
| ‘Foxe1’ | ENSMUSG00000070990_LINE1102_Foxe1_I | 0.001483943 | 0.006438028 |
| ‘Foxd1’ | ENSMUSG00000078302_LINE1106_Foxd1_D | 0.004173324 | 0.015088173 |
| ‘LINE9878’ | NP_0011820571_LINE9878_Gm5294_I_N2 | 0.004173324 | 0.015088173 |
| ‘LINE9832’ | NP_0011820571_LINE9832_Gm5294_I_N1 | 3.54E−09 | 7.14E−08 |
| ‘LINE9910’ | NP_0011820571_LINE9910_Gm5294_I_N5 | 0.012176163 | 0.034451619 |
| ‘LINE9852’ | NP_0011820571_LINE9852_Gm5294_I_N1 | 0.014760252 | 0.040151683 |
| ‘LINE9851’ | NP_0011820571_LINE9851_Gm5294_I_N2 | 0.001483943 | 0.006438028 |
| ‘LINE9930’ | NP_0011820571_LINE9930_Gm5294_I_N3 | 0.010865198 | 0.03180608 |
| ‘LINE9919’ | NP_0011820571_LINE9919_Gm5294_I_N2 | 0.005275007 | 0.017850625 |
| ‘LINE9858’ | NP_0011820571_LINE9858_Gm5294_I_N1 | 0.000650461 | 0.003237001 |
| ‘LINE9950’ | NP_0320502_LINE9950_Foxl1_I_N1 | 3.54E−09 | 7.14E−08 |
| ‘LINE10003’ | NP_0320502_LINE10003_Foxl1_I_N2 | 0.004173324 | 0.015088173 |
| ‘LINE9973’ | NP_0320502_LINE9973_Foxl1_I_N1 | 0.014760252 | 0.040151683 |
| ‘LINE10033’ | NP_0320502_LINE10033_Foxl1_I_N5 | 0.012176163 | 0.034451619 |
| ‘LINE10052’ | NP_0320502_LINE10052_Foxl1_I_N5 | 7.54E−05 | 0.000535861 |
| ‘LINE9972’ | NP_0320502_LINE9972_Foxl1_I_N2 | 0.001483943 | 0.006438028 |
| ‘LINE10046’ | NP_0320502_LINE10046_Foxl1_I_N3 | 0.014958051 | 0.04055933 |
| ‘LINE10042’ | NP_0320502_LINE10042_Foxl1_I_N2 | 0.005275007 | 0.017850625 |
| ‘LINE9979’ | NP_0320502_LINE9979_Foxl1_I_N1 | 0.000650461 | 0.003237001 |
| ‘LINE9995’ | NP_0320502_LINE9995_Foxl1_I_N1 | 1.59E−06 | 1.77E−05 |
| ‘LINE10076’ | NP_0320502_LINE10076_Foxl1_I_N1 | 0.000250829 | 0.001453435 |
| ‘LINE10077’ | NP_0320502_LINE10077_Foxl1_I_N1 | 3.21E−06 | 3.35E−05 |
| ‘Gata6’ | ENSMUSG00000005836_LINE1110_Gata6_D | 0.002844155 | 0.01098701 |
| ‘Gata2’ | ENSMUSG00000015053_LINE1112_Gata2_I | 1.01E−05 | 9.31E−05 |
| ‘Gata3’ | ENSMUSG00000015619_LINE1113_Gata3_D | 1.32E−06 | 1.50E−05 |
| ‘Gata5’ | ENSMUSG00000015627_LINE1114_Gata5_D | 0.002911098 | 0.011194495 |
| ‘Gata4’ | ENSMUSG00000021944_LINE1116_Gata4_D_N1 | 8.98E−08 | 1.41E−06 |
| ‘Gata1’ | ENSMUSG00000031162_LINE1118_Gata1_D | 2.00E−06 | 2.17E−05 |
| ‘Tcfcp2l1’ | ENSMUSG00000026380_LINE1133_Tcfcp2l1_D_N2 | 0.000237672 | 0.001404282 |
| ‘LINE1139’ | A1JVI6_MOUSE_LINE1139_Dux_D | 0.00473653 | 0.016626988 |
| ‘Lhx2’ | ENSMUSG00000000247_LINE1140_Lhx2_D | 0.003509204 | 0.013194608 |
| ‘Hoxa4’ | ENSMUSG00000000942_LINE1144_Hoxa4_D | 0.001481579 | 0.006438028 |
| ‘Sebox’ | ENSMUSG00000001103_LINE1145_Sebox_D | 1.29E−07 | 1.73E−06 |
| ‘Meox1’ | ENSMUSG00000001493_LINE1146_Meox1_D | 1.81E−14 | 1.02E−12 |
| ‘Dlx3’ | ENSMUSG00000001510_LINE1149_Dlx3_D | 3.32E−07 | 4.20E−06 |
| ‘Hoxc13’ | ENSMUSG00000001655_LINE1151_Hoxc13_D | 0.000394319 | 0.002180352 |
| ‘Hoxc11’ | ENSMUSG00000001656_LINE1152_Hoxc11_D | 0.00046936 | 0.002513155 |
| ‘Hoxc8’ | ENSMUSG00000001657_LINE1153_Hoxc8_D | 5.54E−08 | 8.85E−07 |
| ‘Hoxc6’ | ENSMUSG00000001661_LINE1154_Hoxc6_D | 2.27E−20 | 3.85E−18 |
| ‘Hoxd13’ | ENSMUSG00000001819_LINE1156_Hoxd13_D_N3 | 0.000241476 | 0.001408886 |
| ‘Otx1’ | ENSMUSG00000005917_LINE1161_Otx1_D_N2 | 2.90E−05 | 0.000231314 |
| ‘Pknox1’ | ENSMUSG00000006705_LINE1167_Pknox1_D | 0.003891232 | 0.014251004 |
| ‘Pou6f1’ | ENSMUSG00000009739_LINE1170_Pou6f1_D_N2 | 0.003578326 | 0.013394972 |
| ‘Nanog’ | ENSMUSG00000012396_LINE1172_Nanog_D | 0.004662815 | 0.016505196 |
| ‘Phox2b’ | ENSMUSG00000012520_LINE1173_Phox2b_D | 6.96E−05 | 0.000499272 |
| ‘Alx3’ | ENSMUSG00000014603_LINE1174_Alx3_D | 5.10E−13 | 1.88E−11 |
| ‘Hoxa2’ | ENSMUSG00000014704_LINE1175_Hoxa2_D_N2 | 6.73E−09 | 1.27E−07 |
| ‘Lhx1’ | ENSMUSG00000018698_LINE1181_Lhx1_D | 0.000644279 | 0.003237001 |
| ‘Meis1’ | ENSMUSG00000020160_LINE1184_Meis1_D_N2 | 0.003710108 | 0.013706338 |
| ‘Hnf1b’ | ENSMUSG00000020679_LINE1186_Hnf1b_D | 1.86E−05 | 0.000157463 |
| ‘Dlx4’ | ENSMUSG00000020871_LINE1187_Dlx4_D | 2.47E−05 | 0.000202507 |
| ‘Gsc’ | ENSMUSG00000021095_LINE1189_Gsc_D | 0.000765333 | 0.003721103 |
| ‘Vsx2’ | ENSMUSG00000021239_LINE1192_Vsx2_I | 0.000459309 | 0.002475001 |
| ‘Barx1’ | ENSMUSG00000021381_LINE1193_Barx1_D | 0.017275944 | 0.046105516 |
| ‘Pitx1’ | ENSMUSG00000021506_LINE1195_Pitx1_D | 0.000141664 | 0.000990476 |
| ‘Irx4’ | ENSMUSG00000021604_LINE1196_Irx4_D | 7.89E−07 | 9.28E−06 |
| ‘Otp’ | ENSMUSG00000021685_LINE1197_Otp_D | 1.46E−20 | 3.08E−18 |
| ‘Otx2’ | ENSMUSG00000021848_LINE1198_Otx2_D | 2.90E−05 | 0.000231314 |
| ‘Hmbox1’ | ENSMUSG00000021972_LINE1199_Hmbox1_D | 1.86E−05 | 0.000157463 |
| ‘Hoxc10’ | ENSMUSG00000022484_LINE1203_Hoxc10_D_N1 | 9.21E−08 | 1.42E−06 |
| ‘Gsc2’ | ENSMUSG00000022738_LINE1207_Gsc2_I | 0.000603907 | 0.003077742 |
| ‘Dlx2’ | ENSMUSG00000023391_LINE1210_Dlx2_D_N2 | 3.03E−12 | 8.02E−11 |
| ‘Esx1’ | ENSMUSG00000023443_LINE1211_Esx1_D | 1.46E−20 | 3.08E−18 |
| ‘Rax’ | ENSMUSG00000024518_LINE1214_Rax_D | 0.000144178 | 0.000999792 |
| ‘Cdx1’ | ENSMUSG00000024619_LINE1215_Cdx1_D | 0.000151074 | 0.001022466 |
| ‘Lbx1’ | ENSMUSG00000025216_LINE1218_Lbx1_I | 3.11E−15 | 2.19E−13 |
| ‘Pitx3’ | ENSMUSG00000025229_LINE1219_Pitx3_D | 1.01E−07 | 1.45E−06 |
| ‘Msx3’ | ENSMUSG00000025469_LINE1222_Msx3_D_N2 | 0.000838914 | 0.004009725 |
| ‘Lhx4’ | ENSMUSG00000026468_LINE1223_Lhx4_D_N2 | 5.10E−13 | 1.88E−11 |
| ‘Prrx1’ | ENSMUSG00000026586_LINE1226_Prrx1_D | 1.46E−20 | 3.08E−18 |
| ‘Lmx1a’ | ENSMUSG00000026686_LINE1227_Lmx1a_D | 1.33E−06 | 1.50E−05 |
| ‘Barhl1’ | ENSMUSG00000026805_LINE1228_Barhl1_D_N3 | 0.000655022 | 0.003240634 |
| ‘Lhx3’ | ENSMUSG00000026934_LINE1233_Lhx3_D_N1 | 2.40E−12 | 7.01E−11 |
| ‘Meis2’ | ENSMUSG00000027210_LINE1237_Meis2_D_N2 | 0.001456707 | 0.006438028 |
| ‘Shox2’ | ENSMUSG00000027833_LINE1241_Shox2_D_N2 | 9.85E−06 | 9.16E−05 |
| ‘Pitx2’ | ENSMUSG00000028023_LINE1243_Pitx2_D | 0.001063538 | 0.004916685 |
| ‘Lhx8’ | ENSMUSG00000028201_LINE1244_Lhx8_D_N2 | 0.000523886 | 0.002735849 |
| ‘Dmbx1’ | ENSMUSG00000028707_LINE1248_Dmbx1_D | 1.09E−05 | 9.91E−05 |
| ‘Nkx11’ | ENSMUSG00000029112_LINE1250_Nkx11_I | 0.000162352 | 0.001056537 |
| ‘Uncx’ | ENSMUSG00000029546_LINE1251_Uncx_D_N2 | 2.56E−06 | 2.71E−05 |
| ‘Hnf1a’ | ENSMUSG00000029556_LINE1254_Hnf1a_D_N2 | 0.000200549 | 0.00124176 |
| ‘Lhx5’ | ENSMUSG00000029595_LINE1256_Lhx5_D | 3.51E−13 | 1.75E−11 |
| ‘Dlx5’ | ENSMUSG00000029755_LINE1267_Dlx5_D | 1.24E−07 | 1.69E−06 |
| ‘Hoxa1’ | ENSMUSG00000029844_LINE1268_Hoxa1_D | 1.16E−12 | 3.63E−11 |
| ‘Dbx1’ | ENSMUSG00000030507_LINE1269_Dbx1_D | 2.09E−12 | 6.31E−11 |
| ‘Cdx4’ | ENSMUSG00000031326_LINE1271_Cdx4_I | 0.000151074 | 0.001022466 |
| ‘Irx6’ | ENSMUSG00000031738_LINE1277_Irx6_D | 2.27E−05 | 0.000190192 |
| ‘Isl2’ | ENSMUSG00000032318_LINE1281_Isl2_D | 0.007602138 | 0.023472294 |
| ‘Hdx’ | ENSMUSG00000034551_LINE1289_Hdx_D | 0.003662606 | 0.013590196 |
| ‘Nkx61’ | ENSMUSG00000035187_LINE1293_Nkx61_D | 3.03E−12 | 8.02E−11 |
| ‘Arx’ | ENSMUSG00000035277_LINE1294_Arx_D_N1 | 9.85E−06 | 9.16E−05 |
| ‘Pknox2’ | ENSMUSG00000035934_LINE1297_Pknox2_D_N1 | 0.000156955 | 0.001038516 |
| ‘Gsx2’ | ENSMUSG00000035946_LINE1299_Gsx2_D | 1.49E−07 | 1.97E−06 |
| ‘Hoxc9’ | ENSMUSG00000036139_LINE1300_Hoxc9_D_N1 | 4.06E−13 | 1.81E−11 |
| ‘Meox2’ | ENSMUSG00000036144_LINE1302_Meox2_D | 5.48E−20 | 7.73E−18 |
| ‘Alx1’ | ENSMUSG00000036602_LINE1303_Alx1_D_N3 | 0.000311479 | 0.001745108 |
| ‘Hoxa13’ | ENSMUSG00000038203_LINE1307_Hoxa13_D | 1.89E−06 | 2.07E−05 |
| ‘Hoxa7’ | ENSMUSG00000038236_LINE1314_Hoxa7_D_N2 | 4.42E−10 | 9.58E−09 |
| ‘Hoxa5’ | ENSMUSG00000038253_LINE1315_Hoxa5_D | 0.01003807 | 0.030007799 |
| ‘Hoxb4’ | ENSMUSG00000038692_LINE1316_Hoxb4_D | 0.000157128 | 0.001038516 |
| ‘Pbx3’ | ENSMUSG00000038718_LINE1318_Pbx3_I | 0.005917959 | 0.01925613 |
| ‘Hoxb7’ | ENSMUSG00000038721_LINE1319_Hoxb7_D | 6.82E−05 | 0.000493196 |
| ‘Linx1b’ | ENSMUSG00000038765_LINE1320_Lmx1b_D | 4.11E−16 | 3.48E−14 |
| ‘Six3’ | ENSMUSG00000038805_LINE1321_Six3_D | 0.011904886 | 0.033910887 |
| ‘En2’ | ENSMUSG00000039095_LINE1322_En2_D_N2 | 0.001850831 | 0.007790064 |
| ‘Hlx’ | ENSMUSG00000039377_LINE1324_Hlx_D | 4.11E−16 | 3.48E−14 |
| ‘Alx4’ | ENSMUSG00000040310_LINE1330_Alx4_D_N1 | 0.000311479 | 0.001745108 |
| ‘Hesx1’ | ENSMUSG00000040726_LINE1334_Hesx1_I | 6.29E−06 | 6.34E−05 |
| ‘ENSMUSG00000040953’ | ENSMUSG00000040953_LINE1336_ENSMUSG00000040953_I | 0.014019013 | 0.038758447 |
| ‘Meis3’ | ENSMUSG00000041420_LINE1338_Meis3_D_N2 | 0.001456707 | 0.006438028 |
| ‘Crx’ | ENSMUSG00000041578_LINE1341_Crx_D_N1 | 2.90E−05 | 0.000231314 |
| ‘Obox’ | ENSMUSG00000041583_LINE1343_Obox6_D | 0.014019013 | 0.038758447 |
| ‘Dlx1’ | ENSMUSG00000041911_LINE1345_Dlx1_D_N2 | 0.000269466 | 0.001550803 |
| ‘Isl1’ | ENSMUSG00000042258_LINE1347_Isl1_I | 0.007602138 | 0.023472294 |
| ‘Hoxd11’ | ENSMUSG00000042499_LINE1350_Hoxd11_D | 0.006121383 | 0.019765991 |
| ‘Hoxa6’ | ENSMUSG00000043219_LINE1351_Hoxa6_D | 2.66E−10 | 5.98E−09 |
| ‘Hoxd9’ | ENSMUSG00000043342_LINE1352_Hoxd9_D_N1 | 0.010527 | 0.031139307 |
| ‘Gm4830’ | ENSMUSG00000044538_LINE1358_Gm4830_D | 0.000739742 | 0.003638498 |
| ‘Prop1’ | ENSMUSG00000044542_LINE1359_Prop1_D | 5.10E−13 | 1.88E−11 |
| ‘Dbx2’ | ENSMUSG00000045608_LINE1361_Dbx2_D | 1.24E−07 | 1.69E−06 |
| ‘Msx1’ | ENSMUSG00000048450_LINE1363_Msx1_D | 0.007602138 | 0.023472294 |
| ‘Nkx12’ | ENSMUSG00000048528_LINE1366_Nkx12_D | 3.01E−05 | 0.00023833 |
| ‘Hoxb13’ | ENSMUSG00000049604_LINE1368_Hoxb13_D | 6.63E−05 | 0.000483663 |
| ‘Rhox11’ | ENSMUSG00000051038_LINE1376_Rhox11_D_N4 | 0.001572542 | 0.006787607 |
| ‘Obox1’ | ENSMUSG00000054310_LINE1388_Obox1_D | 1.46E−05 | 0.000130012 |
| ‘Pou3f4’ | ENSMUSG00000056854_LINE1392_Pou3f4_D | 2.41E−05 | 0.000200248 |
| ‘En1’ | ENSMUSG00000058665_LINE1394_En1_D_N1 | 5.10E−13 | 1.88E−11 |
| ‘Irx1’ | ENSMUSG00000060969_LINE1400_Irx1_I | 0.000413591 | 0.002272067 |
| ‘Nkx63’ | ENSMUSG00000063672_LINE1405_Nkx63_I | 4.59E−08 | 7.47E−07 |
| ‘Rhox8’ | ENSMUSG00000064137_LINE1407_Rhox8_I | 0.004734791 | 0.016626988 |
| ‘Tlx2’ | ENSMUSG00000068327_LINE1414_Tlx2_D | 4.00E−07 | 4.91E−06 |
| ‘Obox5’ | ENSMUSG00000074366_LINE1427_Obox5_D | 1.79E−05 | 0.000154875 |
| ‘AC1890281’ | ENSMUSG00000074368_LINE1428_AC1890281_D | 0.011505872 | 0.033263317 |
| ‘Hoxb2’ | ENSMUSG00000075588_LINE1434_Hoxb2_I | 0.000866963 | 0.00412051 |
| ‘Hoxd3’ | ENSMUSG00000079277_LINE1439_Hoxd3_D_N2 | 8.73E−11 | 2.05E−09 |
| ‘LINE6215’ | NP_0010765961_LINE6215_NP_0010765961_I_N4 | 6.63E−06 | 6.59E−05 |
| ‘LINE6216’ | NP_0010765961_LINE6216_NP_0010765961_I_N4 | 5.41E−05 | 0.000401756 |
| ‘LINE6234’ | NP_0322962_LINE6234_NP_0322962_I_N2 | 4.06E−13 | 1.81E−11 |
| ‘LINE6255’ | NP_0322962_LINE6255_NP_0322962_I_N2 | 1.79E−07 | 2.30E−06 |
| ‘LINE6262’ | NP_0322962_LINE6262_NP_0322962_I_N2 | 0.000239027 | 0.001404282 |
| ‘LINE6275’ | NP_0323002_LINE6275_NP_0323002_I_N8 | 0.000808865 | 0.003910282 |
| ‘LINE6276’ | NP_0832781_LINE6276_NP_0832781_I_N11 | 3.03E−12 | 8.02E−11 |
| ‘LINE1462’ | NP_6637552_LINE1462_NP_6637552_I_N11 | 1.79E−05 | 0.000154875 |
| ‘LINE1463’ | Q8VHG7_MOUSE_LINE1463_Q8VHG7_MOUSE_I | 0.011505872 | 0.033263317 |
| ‘LINE1464’ | XP_0014736851_LINE1464_Nkx11_D_N7 | 0.000162352 | 0.001056537 |
| ‘Pou1f1’ | ENSMUSG00000004842_LINE1469_Pou1f1_D_N3 | 0.002547605 | 0.010214569 |
| ‘Pou2f2’ | ENSMUSG00000008496_LINE1472_Pou2f2_D_N1 | 3.37E−05 | 0.000264071 |
| ‘Pou2f1’ | ENSMUSG00000026565_LINE1482_Pou2f1_D_N1 | 3.75E−08 | 6.23E−07 |
| ‘LINE15940’ | NP_0328751_LINE15940_Pit1_I_N1 | 0.000145431 | 0.00100028 |
| ‘Hsf2’ | ENSMUSG00000019878_LINE1489_Hsf2_I | 0.013936365 | 0.038758447 |
| ‘Hsf1’ | ENSMUSG00000022556_LINE1490_Hsf1_I | 0.004839921 | 0.016781038 |
| ‘Irf9’ | ENSMUSG00000002325_LINE1495_Irf9_D | 5.52E−06 | 5.62E−05 |
| ‘Irf3’ | ENSMUSG00000003184_LINE1496_Irf3_D | 0.005108253 | 0.017496283 |
| ‘Irf1’ | ENSMUSG00000018899_LINE1497_Irf1_I | 2.75E−11 | 6.84E−10 |
| ‘Irf4’ | ENSMUSG00000021356_LINE1498_Irf4_D | 9.96E−05 | 0.000701864 |
| ‘Irf7’ | ENSMUSG00000025498_LINE1499_Irf7_D | 2.24E−08 | 3.79E−07 |
| ‘Irf5’ | ENSMUSG00000029771_LINE1501_Irf5_D | 0.013778579 | 0.038470885 |
| ‘Irf2’ | ENSMUSG00000031627_LINE1502_Irf2_D | 0.00036855 | 0.002051274 |
| ‘Mef2a’ | ENSMUSG00000030557_LINE1510_Mef2a_I | 1.38E−05 | 0.000124289 |
| ‘Cdc5l’ | ENSMUSG00000023932_LINE1532_Cdc5l_I | 0.003644491 | 0.013582551 |
| ‘Pparg’ | ENSMUSG00000000440_LINE1566_Pparg_I | 0.000170946 | 0.001103971 |
| ‘Nr1h3’ | ENSMUSG00000002108_LINE1571_Nr1h3_I | 0.0154194 | 0.041543988 |
| ‘Ppard’ | ENSMUSG00000002250_LINE1572_Ppard_I | 0.000521184 | 0.002735849 |
| ‘Nr1i3’ | ENSMUSG00000005677_LINE1576_Nr1i3_I | 3.73E−05 | 0.000287112 |
| ‘Nr2c2’ | ENSMUSG00000005893_LINE1577_Nr2c2_I | 0.002727545 | 0.010631882 |
| ‘Hnf4g’ | ENSMUSG00000017688_LINE1589_Hnf4g_I | 2.68E−10 | 5.98E−09 |
| ‘Hnf4a’ | ENSMUSG00000017950_LINE1590_Hnf4a_D_N1 | 6.68E−07 | 7.95E−06 |
| ‘Esr2’ | ENSMUSG00000021055_LINE1597_Esr2_I | 0.005409869 | 0.018161704 |
| ‘Vdr’ | ENSMUSG00000022479_LINE1604_Vdr_D | 0.005508218 | 0.018418784 |
| ‘Nr1i2’ | ENSMUSG00000022809_LINE1605_Nr1i2_I | 0.004804328 | 0.016781038 |
| ‘Nr3c1’ | ENSMUSG00000024431_LINE1607_Nr3c1_D | 2.83E−14 | 1.49E−12 |
| ‘Rorc’ | ENSMUSG00000028150_LINE1616_Rorc_I | 6.39E−09 | 1.23E−07 |
| ‘Rora’ | ENSMUSG00000032238_LINE1621_Rora_D | 0.000216585 | 0.001308792 |
| ‘Nr2e3’ | ENSMUSG00000032292_LINE1622_Nr2e3_D | 0.000295171 | 0.001675936 |
| ‘Nr1h2’ | ENSMUSG00000060601_LINE1635_Nr1h2_I | 0.0154194 | 0.041543988 |
| ‘Nr6a1’ | ENSMUSG00000063972_LINE1636_Nr6a1_I | 0.013533646 | 0.037912134 |
| ‘Rel’ | ENSMUSG00000020275_LINE1654_Rel_I | 4.13E−06 | 4.26E−05 |
| ‘Nfkb1’ | ENSMUSG00000028163_LINE1660_Nfkb1_I | 0.004302539 | 0.015358429 |
| ‘Rfx2’ | ENSMUSG00000024206_LINE1666_Rfx2_D_N1 | 9.90E−08 | 1.44E−06 |
| ‘Rfx8’ | ENSMUSG00000057173_LINE1673_Rfx8_I | 9.90E−08 | 1.44E−06 |
| ‘Runx2’ | ENSMUSG00000039153_LINE1675_Runx2_I | 0.001269727 | 0.005775211 |
| ‘Nfix’ | ENSMUSG00000001911_LINE1689_Nfix_I | 0.001674877 | 0.007156294 |
| ‘Nfic’ | ENSMUSG00000055053_LINE1700_Nfic_I | 0.006699403 | 0.021227323 |
| ‘Sox9’ | ENSMUSG00000000567_LINE1701_Sox9_I | 0.007564504 | 0.023472294 |
| ‘Hbp1’ | ENSMUSG00000002996_LINE1704_Hbp1_D | 5.30E−19 | 6.41E−17 |
| ‘Hmg20b’ | ENSMUSG00000020232_LINE1710_Hmg20b_D | 4.35E−15 | 2.83E−13 |
| ‘Bbx’ | ENSMUSG00000022641_LINE1712_Bbx_D | 0.000602098 | 0.003077742 |
| ‘Sox17’ | ENSMUSG00000025902_LINE1716_Sox17_D_N1 | 0.01062789 | 0.031304278 |
| ‘Sox3’ | ENSMUSG00000045179_LINE1741_Sox3_D_N1 | 6.85E−06 | 6.74E−05 |
| ‘Sox14’ | ENSMUSG00000053747_LINE1752_Sox14_D_N1 | 1.20E−07 | 1.69E−06 |
| ‘Tcf7l1’ | ENSMUSG00000055799_LINE1755_Tcf7l1_D | 0.015550218 | 0.041763443 |
| ‘ENSMUSG00000079994’ | ENSMUSG00000079994_LINE1775_ENSMUSG00000079994_D_N1 | 0.001869697 | 0.007830515 |
| ‘Stat6’ | ENSMUSG00000002147_LINE1780_Stat6_D | 0.001035523 | 0.004813476 |
| ‘Stat2’ | ENSMUSG00000040033_LINE1785_Stat2_I | 1.85E−16 | 1.95E−14 |
| ‘Tbp’ | ENSMUSG00000014767_LINE1805_Tbp_D | 0.00422152 | 0.015133075 |
| ‘Tbpl2’ | ENSMUSG00000061809_LINE1806_Tbpl2_I | 0.00422152 | 0.015133075 |
| ‘Prkrir’ | ENSMUSG00000030753_LINE1815_Prkrir_I | 0.001825941 | 0.007723731 |
| ‘Hmga1’ | ENSMUSG00000046711_LINE73_Hmga1_I_N2 | 0.009923832 | 0.029771496 |
| ‘Hmga1rs1’ | ENSMUSG00000078249_LINE85_Hmga1rs1_I_N2 | 0.009923832 | 0.029771496 |
| ‘Myf5’ | ENSMUSG00000000435_LINE113_Myf5_I_N8 | 1.44E−08 | 2.54E−07 |
| ‘Ascl1’ | ENSMUSG00000020052_LINE158_Ascl1_I_N2 | 0.001919928 | 0.007962054 |
| ‘Tal1’ | ENSMUSG00000028717_LINE236_Tal1_I_N4 | 0.007276594 | 0.022799994 |
| ‘Lyl1’ | ENSMUSG00000034041_LINE273_Lyl1_I_N4 | 0.007276594 | 0.022799994 |
| ‘Twist1’ | ENSMUSG00000035799_LINE296_Twist1_I_N2 | 0.003806104 | 0.013999844 |
| ‘Snai2’ | ENSMUSG00000022676_LINE952_Snai2_I_N5 | 0.000439728 | 0.002400064 |
| ‘Zfp148’ | ENSMUSG00000022811_LINE962_Zfp148_I_N2 | 5.08E−12 | 1.30E−10 |
| ‘Klf15’ | ENSMUSG00000030087_LINE1139_Klf15_I | 0.010656776 | 0.031304278 |
| ‘Maz’ | ENSMUSG00000030678_LINE1154_Maz_I | 6.94E−11 | 1.68E−09 |
| ‘Zfp219’ | ENSMUSG00000049295_LINE1480_Zfp219_I | 0.004895778 | 0.016905419 |
| ‘Ybx2’ | ENSMUSG00000018554_LINE2089_Ybx2_I_N1 | 0.005768634 | 0.01889848 |
| ‘Ybx1’ | ENSMUSG00000028639_LINE2093_Ybx1_I_N1 | 0.005768634 | 0.01889848 |
| ‘Csda’ | ENSMUSG00000030189_LINE2097_Csda_I_N1 | 0.005768634 | 0.01889848 |
| ‘Ets2’ | ENSMUSG00000022895_LINE2391_Ets2_I_N55 | 0.011638229 | 0.033263317 |
| ‘Ubp1’ | ENSMUSG00000009741_LINE5318_Ubp1_I_N2 | 0.000237672 | 0.001404282 |
| ‘Nkx62’ | ENSMUSG00000041309_LINE5799_Nkx62_I_N5 | 0.000152311 | 0.001022656 |
| ‘Pou4f2’ | ENSMUSG00000031688_LINE6328_Pou4f2_I_N4 | 9.62E−06 | 9.14E−05 |
| ‘Pou4f1’ | ENSMUSG00000048349_LINE6338_Pou4f1_I_N4 | 9.62E−06 | 9.14E−05 |
| ‘Mef2d’ | ENSMUSG00000001419_LINE6419_Mef2d_I_N14 | 0.00019202 | 0.001212305 |
| ‘Nr1d1’ | ENSMUSG00000020889_LINE6649_Nr1d1_I_N1 | 9.77E−09 | 1.76E−07 |
| ‘Nr1d2’ | ENSMUSG00000021775_LINE6674_Nr1d2_I_N1 | 9.77E−09 | 1.76E−07 |
| ‘Thrb’ | ENSMUSG00000021779_LINE6679_Thrb_I_N2 | 0.008796962 | 0.026867256 |
| ‘Nr4a1’ | ENSMUSG00000023034_LINE6710_Nr4a1_I_N5 | 0.000819831 | 0.003940777 |
| ‘Pgr’ | ENSMUSG00000031870_LINE6829_Pgr_I_N9 | 1.22E−06 | 1.41E−05 |
| ‘Thra’ | ENSMUSG00000058756_LINE6865_Thra_I_N2 | 0.008796962 | 0.026867256 |
| ‘Trp63’ | ENSMUSG00000022510_LINE6881_Trp63_I_N2 | 0.000496785 | 0.002626752 |
| ‘Relb’ | ENSMUSG00000002983_LINE7015_Relb_I | 0.00483953 | 0.016781038 |
| ‘Tbx15’ | ENSMUSG00000027868_LINE7567_Tbx15_I_N1 | 0.002255887 | 0.009175385 |
| ‘Tbx22’ | ENSMUSG00000031241_LINE7574_Tbx22_I_N1 | 0.002255887 | 0.009175385 |
| ‘Tbx18’ | ENSMUSG00000032419_LINE7580_Tbx18_I_N1 | 0.002255887 | 0.009175385 |
| ‘Tead3’ | ENSMUSG00000002249_LINE7609_Tead3_I_N1 | 0.002624079 | 0.010422397 |
| ‘Hif3a’ | ENSMUSG00000004328_LINE324_Hif3a_I_N1 | 9.69E−08 | 1.44E−06 |
| ‘Wt1’ | ENSMUSG00000016458_LINE2218_Wt1_I | 7.98E−06 | 7.76E−05 |
| ‘LINE3883’ | Q8K439_MOUSE_LINE3883_Zfp263_I_N2 | 0.000885828 | 0.004186649 |
| ‘LINE3878’ | Q8K439_MOUSE_LINE3878_Zfp263_I_N1 | 0.000448652 | 0.002433072 |
| ‘Mef2b’ | ENSMUSG00000079033_LINE16135_Mef2b_I_N14 | 0.00019202 | 0.001212305 |

[0626] To comprehensively investigate the impact of ageing on adult neurogenesis, the cellular density across different conditions along the neurogenesis trajectory were compared based on the recovered single-cell transcriptomes. Consistent with the cell type level analysis (FIG. 34c), a dramatic age-dependent reduction in the cellular density of neural progenitor cells (NPC) and DG neuroblasts (DGNB) was observed, but not in OB neuroblasts (FIG. 35c). The finding was further validated through the chromatin accessibility profile, where a recently published differential abundance testing algorithm, Milo (Dann et al., Nat. Biotechnol. (2021) doi:10.1038/s41587-021-01033-z), was applied to identify the cellular neighborhoods that are significantly altered upon ageing. Thirty-one differentially decreased cellular neighborhoods were identified (FIG. 35d, 5% FDR), mostly from the neural progenitor cells (NPC) and DG neuroblasts (DGNB). This analysis further validated that ageing affects neurogenesis by down-regulating the proliferation behaviors of its progenitor cells.

[0627] To further decipher the molecular mechanisms underlying the age-dependent changes in neuronal progenitor cells, differential gene expression analysis was performed across young, adult, and aged conditions and yielded thirty genes showing concordant changes over time, supported by both gene expression and accessibility of promoters or linked distal sites (FIG. 35e). For example, two neurotrophic factors involved in the Erbb pathway, Nrg1 and Nrg3, exhibited reduced expression and promoter accessibility upon ageing. Indeed, they have been shown to maintain neurogenesis upon administration in vivo (Mahar et al., Sci. Rep. 6, 30467 (2016)). In addition, several other known regulators of neurogenesis, such as Nr2f1 and Nap1l1 (Qiao et al., Cell Rep. 22, 2279-2293 (2018); Bertacchi et al., EMBO J. 39, e104163 (2020)), were significantly down-regulated upon ageing, suggesting they may serve as putative targets for restoring adult neurogenesis in future studies.

### The Impact of Ageing on Adult Oligodendrogenesis

[0628] Next, cell types that span multiple stages of oligodendrogenesis for pseudotime analysis were isolated in silico, yielding a simple trajectory defined by integrated transcriptome and chromatin accessibility profiles (FIG. 35a). The oligodendrogenesis trajectory was further validated by the RNA velocity analysis and the time-dependent labeling experiment mentioned above (FIG. 36). Through differential expression (DE) and differential accessibility (DA) analysis, 8,443 DE genes and 15,164 DA sites that were significantly changed along the trajectory (5% FDR) were identified. This analysis nominated known oligodendrogenesis regulators (e.g., Zfp276 (Aberle et al., Nucleic Acids Res. 50, 1951-1968 (2022)) and Myrf (Fletcher et al., Semin. Cell Dev. Biol. 118, 14-23 (2021)) and related pathways (e.g., cholesterol biosynthesis (Mathews et al., J. Neurosci. 36, 7628-7639 (2016)), as well as novel gene markers, such as Snx10, Rfbox2, and Tenm2 (FIG. 37c), that are validated by strong correlations between their expression and promoter accessibility dynamics in oligodendrogenesis but are less-characterized in previous studies. In addition, 97 TFs that exhibited significantly altered gene expression and motif accessibility were identified (FIG. 35b), including known regulators of oligodendrocyte differentiation such as Sox5, Sox10, Pknox1, and Nkx6-2 (Emery et al., Cold Spring Harb. Perspect. Biol. 7, a020461 (2015); Kato et al., PLOS One 10, e0145334 (2015); Javed et al., bioRxiv 2021.12.01.470829 (2021) doi:10.1101/2021.12.01.470829). Furthermore, novel TF markers were detected, including Ikzf4, a known regulator of Müller glia differentiation in retina (Javed et al., bioRxiv 2021.12.01.470829 (2021) doi:10.1101/2021.12.01.470829), and several potential transcriptional ‘repressors’ (e.g., Esrra, Esrrg, Elk3, Zeb1) characterized by the negative correlation between their expression and motif accessibility along the trajectory of oligodendrogenesis (FIG. 35b).

[0629] The impact of ageing on adult oligodendrogenesis was further investigated by examining cellular density across different conditions along the cellular differentiation trajectory. Unlike adult neurogenesis, a remarkable reduction in committed oligodendrocyte precursors (COPs) rather than the early progenitor cells was observed. The result is further validated through the Milo (Dann et al., Nat. Biotechnol. (2021) doi:10.1038/s41587-021-01033-z) analysis of chromatin accessibility profiles, where thirteen cellular neighborhoods that are differentially decreased upon ageing were identified, all exclusively overlapped with the committed oligodendrocyte precursors (COPs) (FIG. 35d, 5% FDR). In fact, a consistent ageing-associated depletion of newly formed oligodendrocytes was detected in the companion study (Cao et al., Science 370, 924-925 (2020)), which is in accordance with previous report (Givre et al., Journal of Neuro-Ophthalmology vol. 23 168 (2003)).

[0630] Finally, to delineate the molecular programs contributing to down-regulated oligodendrogenesis upon ageing, the significantly dysregulated genes in OPCs were examined and 242 DE genes were identified (FDR of 10%, Table 10). Many of the top DE genes are cross-validated by two independent molecular layers (i.e., both gene expression and promoter accessibility) and involved in molecular processes critical for oligodendrocyte differentiations such as cell cycle (e.g., Cables1 (He et al., Stem Cell Reports 13, 274-290 (2019)) or cell migration (e.g., Ephb1, Epha4, Plxna4) (Linneberg et al., ASN Neuro 7, (2015); Smith et al., Curr. Biol. 7, 561-570 (1997)). (FIG. 35e). For example, age-dependent down-regulation of Ryr2 (FIG. 35e) was detected, a ryanodine receptor that mediates endoplasmic reticulum Ca²⁺ release which is essential for initiating OPC differentiation (Li et al., Front. Mol. Neurosci. 11, 162 (2018)). Intriguingly, two sphingomyelin metabolism-related genes exhibited opposite dynamics between young and aged OPCs (FIG. 35e): Sgms1, a gene encoding a sphingomyelin synthase critical for converting phosphatidylcholine and ceramide to ceramide phosphocholine (sphingomyelin) and diacylglycerol at the Golgi apparatus (Tafesse et al., J. Biol. Chem. 282, 17537-17547 (2007); Huitema et al., EMBO J. 23, 33-44 (2004)), was substantially down-regulated in the aged OPCs. By contrast, Smpd4, encoding a sphingomyelin phosphodiesterase that catalyzes the reverse reaction (Krut et al., J. Biol. Chem. 281, 13784-13793 (2006)), was significantly up-regulated in OPCs upon ageing, (FIG. 38). As a result, the age-dependent changes of both Sgms1 and Smpd4 facilitate the accumulation of ceramide and depletion of sphingomyelin in OPCs, which has been reported to increase cellular susceptibility to senescence and cell death (Hannun et al., Nat. Rev. Mol. Cell Biol. 9, 139-150 (2008); Jana et al., J. Neurol. Sci. 278, 5-15 (2009)). This is consistent with a recent report that inhibiting another sphingomyelin hydrolase nSMase2 enhances myelination during the differentiation of OPCs (Yoo et al., Sci Adv 6, (2020)), suggesting a critical role of the dysregulated sphingomyelin metabolism in blocking oligodendrocyte differentiation.

TABLE 10
Differential expressed genes in oligodendrocytes progenitor cells
across aged groups supported by promoters or linked distal sites

| gene_id | gene_short_name | gene_type | pval | qval | comments |
|---|---|---|---|---|---|
| ENSMUSG00000021606.9 | ‘Ndufs6’ | PC | 5.92E−227 | 2.34E−223 | Ageing_depleted |
| ENSMUSG00000048327.7 | ‘Ckap2l’ | PC | 1.24E−67 | 6.99E−65 | Ageing_depleted |
| ENSMUSG00000042302.15 | ‘Ehbp1’ | PC | 8.21E−49 | 2.95E−46 | Ageing_depleted |
| ENSMUSG00000119584.1 | ‘Rn18s' | rRNA | 1.05E−28 | 2.87E−26 | Ageing_depleted |
| ENSMUSG00000026155.14 | ‘Smap1’ | PC | 1.52E−26 | 3.64E−24 | Ageing_depleted |
| ENSMUSG00000030990.19 | ‘Pgap2’ | PC | 2.31E−21 | 4.56E−19 | Ageing_depleted |
| ENSMUSG00000027777.16 | ‘Schip1’ | PC | 4.48E−18 | 7.72E−16 | Ageing_depleted |
| ENSMUSG00000062937.8 | ‘Mtap’ | PC | 6.40E−18 | 1.08E−15 | Ageing_depleted |
| ENSMUSG00000085456.3 | ‘Gm15398’ | IncRNA | 7.07E−17 | 1.08E−14 | Ageing_depleted |
| ENSMUSG00000029635.16 | ‘Cdk8’ | PC | 4.32E−14 | 5.60E−12 | Ageing_depleted |
| ENSMUSG00000034813.19 | ‘Grip1’ | PC | 1.55E−13 | 1.92E−11 | Ageing_depleted |
| ENSMUSG00000117441.2 | ‘Gm50021’ | IncRNA | 5.38E−13 | 6.55E−11 | Ageing_depleted |
| ENSMUSG00000069049.12 | ‘Eif2s3y’ | PC | 1.19E−12 | 1.41E−10 | Ageing_depleted |
| ENSMUSG00000024598.10 | ‘Fbn2’ | PC | 3.73E−11 | 3.79E−09 | Ageing_depleted |
| ENSMUSG00000038515.11 | ‘Grtp1’ | PC | 1.16E−10 | 1.15E−08 | Ageing_depleted |
| ENSMUSG00000021313.17 | ‘Ryr2’ | PC | 1.26E−09 | 1.14E−07 | Ageing_depleted |
| ENSMUSG00000110831.2 | ‘Gm48159’ | IncRNA | 1.60E−09 | 1.36E−07 | Ageing_depleted |
| ENSMUSG00000032537.16 | ‘Ephb1’ | PC | 2.49E−09 | 2.05E−07 | Ageing_depleted |
| ENSMUSG00000078489.3 | ‘Gm17106’ | IncRNA | 9.71E−09 | 7.54E−07 | Ageing_depleted |
| ENSMUSG00000029088.17 | ‘Kcnip4’ | PC | 1.17E−08 | 8.83E−07 | Ageing_depleted |
| ENSMUSG00000068457.15 | ‘Uty’ | PC | 7.68E−08 | 5.53E−06 | Ageing_depleted |
| ENSMUSG00000020524.17 | ‘Gria1’ | PC | 8.50E−08 | 5.91E−06 | Ageing_depleted |
| ENSMUSG00000008489.19 | ‘Elavl2’ | PC | 9.04E−08 | 6.22E−06 | Ageing_depleted |
| ENSMUSG00000046707.10 | ‘Csnk2a2 | PC | 1.86E−07 | 1.22E−05 | Ageing_depleted |
| ENSMUSG00000027238.18 | ‘Frmd5’ | PC | 2.76E−07 | 1.75E−05 | Ageing_depleted |
| ENSMUSG00000095041.8 | ‘ENSMUSG00000095041’ | PC | 7.28E−07 | 4.24E−05 | Ageing_depleted |
| ENSMUSG00000031585.14 | ‘Gtf2e2’ | PC | 1.28E−06 | 6.92E−05 | Ageing_depleted |
| ENSMUSG00000033854.11 | ‘Kcnk10’ | PC | 1.38E−06 | 7.37E−05 | Ageing_depleted |
| ENSMUSG00000029765.13 | ‘Plxna4’ | PC | 2.39E−06 | 0.000122679 | Ageing_depleted |
| ENSMUSG00000040451.19 | ‘Sgms1’ | PC | 6.71E−06 | 0.000316223 | Ageing_depleted |
| ENSMUSG00000028906.18 | ‘Epb41’ | PC | 6.85E−06 | 0.000320831 | Ageing_depleted |
| ENSMUSG00000027333.19 | ‘Smox’ | PC | 1.06E−05 | 0.000472257 | Ageing_depleted |
| ENSMUSG00000030518.18 | ‘Fam189a1’ | PC | 1.18E−05 | 0.000520296 | Ageing_depleted |
| ENSMUSG00000031790.9 | ‘Mmp15’ | PC | 1.62E−05 | 0.000691207 | Ageing_depleted |
| ENSMUSG00000026235.15 | ‘Epha4’ | PC | 1.83E−05 | 0.000764575 | Ageing_depleted |
| ENSMUSG00000074968.12 | ‘Ano3’ | PC | 1.98E−05 | 0.000823546 | Ageing_depleted |
| ENSMUSG00000067028.12 | ‘Cntnap5b’ | PC | 2.49E−05 | 0.00101514 | Ageing_depleted |
| ENSMUSG00000026914.16 | ‘Psmd14’ | PC | 3.78E−05 | 0.001490806 | Ageing_depleted |
| ENSMUSG00000034098.15 | ‘Fst15’ | PC | 4.09E−05 | 0.001596294 | Ageing_depleted |
| ENSMUSG00000028389.13 | ‘Zfp37’ | PC | 4.92E−05 | 0.001881396 | Ageing_depleted |
| ENSMUSG00000044499.12 | ‘Hs3st5’ | PC | 5.36E−05 | 0.00203401 | Ageing_depleted |
| ENSMUSG00000051323.17 | ‘Pcdh19’ | PC | 7.18E−05 | 0.002549189 | Ageing_depleted |
| ENSMUSG00000001786.15 | ‘Fbxo7’ | PC | 8.34E−05 | 0.00282182 | Ageing_depleted |
| ENSMUSG00000047213.15 | ‘Ythdf3’ | PC | 9.68E−05 | 0.003148867 | Ageing_depleted |
| ENSMUSG00000035864.15 | ‘Syt1’ | PC | 9.70E−05 | 0.003148867 | Ageing_depleted |
| ENSMUSG00000001017.16 | ‘Chtop’ | PC | 0.00010031 | 0.003202628 | Ageing_depleted |
| ENSMUSG00000025658.17 | ‘Cnksr2’ | PC | 0.000106332 | 0.003327806 | Ageing_depleted |
| ENSMUSG00000079671.9 | ‘2610203C22Rik’ | IncRNA | 0.000113831 | 0.003520758 | Ageing_depleted |
| ENSMUSG00000028949.14 | ‘Smarcd3’ | PC | 0.00012613 | 0.003826424 | Ageing_depleted |
| ENSMUSG00000042447.14 | ‘Mios' | PC | 0.000130793 | 0.003937714 | Ageing_depleted |
| ENSMUSG00000074785.6 | ‘Plxnc1’ | PC | 0.000139544 | 0.004086783 | Ageing_depleted |
| ENSMUSG00000052949.15 | ‘Rnf157’ | PC | 0.000146252 | 0.004195748 | Ageing_depleted |
| ENSMUSG00000027204.14 | ‘Fbn1’ | PC | 0.000202246 | 0.005355792 | Ageing_depleted |
| ENSMUSG00000043336.15 | ‘Filip1l’ | PC | 0.000217813 | 0.005691882 | Ageing_depleted |
| ENSMUSG00000103563.2 | ‘8030445P17Rik’ | TEC | 0.000228909 | 0.005942638 | Ageing_depleted |
| ENSMUSG00000022973.19 | ‘Synj1’ | PC | 0.000291742 | 0.007333385 | Ageing_depleted |
| ENSMUSG00000032030.17 | ‘Cul5’ | PC | 0.000331321 | 0.008076122 | Ageing_depleted |
| ENSMUSG00000011960.13 | ‘Ccnt1’ | PC | 0.000365871 | 0.008752161 | Ageing_depleted |
| ENSMUSG00000028360.11 | ‘Slc44a5’ | PC | 0.000398469 | 0.00936224 | Ageing_depleted |
| ENSMUSG00000034573.15 | ‘Ptpn13’ | PC | 0.000445318 | 0.010279966 | Ageing_depleted |
| ENSMUSG00000111842.2 | ‘Gm49318’ | PC | 0.000463107 | 0.010597926 | Ageing_depleted |
| ENSMUSG00000047261.10 | ‘Gap43’ | PC | 0.000465349 | 0.010618539 | Ageing_depleted |
| ENSMUSG00000029563.17 | ‘Foxp2’ | PC | 0.000513436 | 0.011582287 | Ageing_depleted |
| ENSMUSG00000094962.2 | ‘Gm21954’ | PC | 0.000568833 | 0.012651731 | Ageing_depleted |
| ENSMUSG00000098145.2 | ‘Gm26936’ | IncRNA | 0.000584633 | 0.01282305 | Ageing_depleted |
| ENSMUSG00000022340.16 | ‘Sybu’ | PC | 0.000583182 | 0.01282305 | Ageing_depleted |
| ENSMUSG00000026933.18 | ‘Camsap1’ | PC | 0.000681398 | 0.014464631 | Ageing_depleted |
| ENSMUSG00000021288.20 | ‘Klc1’ | PC | 9.96E−04 | 1.94E−02 | Ageing_depleted |
| ENSMUSG00000116933.2 | ‘Atp5o’ | PC | 1.02E−03 | 1.97E−02 | Ageing_depleted |
| ENSMUSG00000028698.14 | ‘Pik3r3’ | PC | 1.06E−03 | 2.03E−02 | Ageing_depleted |
| ENSMUSG00000024725.14 | ‘Ostf1’ | PC | 1.19E−03 | 2.20E−02 | Ageing_depleted |
| ENSMUSG00000024241.8 | ‘Sos1’ | PC | 1.25E−03 | 2.23E−02 | Ageing_depleted |
| ENSMUSG00000038733.15 | ‘Wdr26’ | PC | 1.26E−03 | 2.25E−02 | Ageing_depleted |
| ENSMUSG00000021676.11 | ‘Iqgap2’ | PO | 1.40E−03 | 2.42E−02 | Ageing_depleted |
| ENSMUSG00000102918.2 | ‘Pcdhgc3’ | PC | 1.45E−03 | 2.48E−02 | Ageing_depleted |
| ENSMUSG00000027339.16 | ‘Rassf2’ | PC | 1.51E−03 | 2.57E−02 | Ageing_depleted |
| ENSMUSG00000022456.19 | ‘Septin3’ | PC | 1.53E−03 | 2.60E−02 | Ageing_depleted |
| ENSMUSG00000086805.10 | ‘4932443L11Rik’ | IncRNA | 1.65E−03 | 2.75E−02 | Ageing_depleted |
| ENSMUSG00000057147.14 | ‘Dph6’ | PC | 1.69E−03 | 2.79E−02 | Ageing_depleted |
| ENSMUSG00000054976.15 | ‘Nyap2’ | PC | 1.75E−03 | 2.83E−02 | Ageing_depleted |
| ENSMUSG00000031451.7 | ‘Gas6’ | PC | 1.77E−03 | 2.85E−02 | Ageing_depleted |
| ENSMUSG00000025777.9 | ‘Gdap1’ | PC | 2.02E−03 | 3.15E−02 | Ageing_depleted |
| ENSMUSG00000041415.11 | ‘Dicer1’ | PC | 2.11E−03 | 3.26E−02 | Ageing_depleted |
| ENSMUSG00000038872.11 | ‘Zfhx3’ | PC | 2.13E−03 | 3.28E−02 | Ageing_depleted |
| ENSMUSG00000061186.16 | ‘Sfmbt2’ | PC | 2.36E−03 | 3.46E−02 | Ageing_depleted |
| ENSMUSG00000021366.9 | ‘Hivep1’ | PC | 2.38E−03 | 3.48E−02 | Ageing_depleted |
| ENSMUSG00000016933.18 | ‘Plcg1’ | PC | 2.48E−03 | 3.55E−02 | Ageing_depleted |
| ENSMUSG00000031601.17 | ‘Cnot7’ | PC | 2.74E−03 | 3.74E−02 | Ageing_depleted |
| ENSMUSG00000055214.16 | ‘Pld5’ | PC | 2.84E−03 | 3.83E−02 | Ageing_depleted |
| ENSMUSG00000028414.18 | ‘Fktn’ | PC | 3.56E−03 | 4.49E−02 | Ageing_depleted |
| ENSMUSG00000035305.6 | ‘Ror1’ | PC | 3.69E−03 | 4.61E−02 | Ageing_depleted |
| ENSMUSG00000040722.8 | ‘Scamp5’ | PC | 3.72E−03 | 0.046129142 | Ageing_depleted |
| ENSMUSG00000054752.17 | ‘Fsd1l’ | PC | 3.77E−03 | 0.04652168 | Ageing_depleted |
| ENSMUSG00000062184.12 | ‘Hs6st2’ | PC | 4.24E−03 | 0.050227065 | Ageing_depleted |
| ENSMUSG00000061950.18 | ‘Ppp4r1’ | PC | 4.97E−03 | 0.055772619 | Ageing_depleted |
| ENSMUSG00000103719.2 | ‘Gm38039’ | IncRNA | 5.42E−03 | 0.058768436 | Ageing_depleted |
| ENSMUSG00000009575.15 | ‘Cbx5’ | PC | 5.52E−03 | 0.059534429 | Ageing_depleted |
| ENSMUSG00000035517.18 | ‘Tdrd7’ | PC | 5.56E−03 | 0.059799308 | Ageing_depleted |
| ENSMUSG00000029253.13 | ‘Cenpc1’ | PC | 5.84E−03 | 0.062106203 | Ageing_depleted |
| ENSMUSG00000037013.18 | ‘Ss18’ | PC | 0.005998944 | 0.062995012 | Ageing_depleted |
| ENSMUSG00000041439.16 | ‘Mfsd6’ | PC | 0.006233812 | 0.064186372 | Ageing_depleted |
| ENSMUSG00000057880.13 | ‘Abat’ | PC | 0.006352025 | 0.064776375 | Ageing_depleted |
| ENSMUSG00000026113.18 | ‘Inpp4a’ | PC | 0.008081714 | 0.075550187 | Ageing_depleted |
| ENSMUSG00000102995.2 | ‘A330074H02Rik’ | TEC | 0.00825689 | 0.076239129 | Ageing_depleted |
| ENSMUSG00000050447.16 | ‘Lypd6’ | PC | 0.008469695 | 0.077440006 | Ageing_depleted |
| ENSMUSG00000041229.16 | ‘Phf8’ | PC | 0.008531851 | 0.077896229 | Ageing_depleted |
| ENSMUSG00000037996.18 | ‘Slc24a2’ | PC | 0.008687357 | 0.078793237 | Ageing_depleted |
| ENSMUSG00000060424.15 | ‘Pantr1’ | IncRNA | 0.009255064 | 0.081787499 | Ageing_depleted |
| ENSMUSG00000024426.18 | ‘Atat1’ | PC | 0.009279068 | 0.081816997 | Ageing_depleted |
| ENSMUSG00000049122.18 | ‘Frmd3’ | PC | 0.00955401 | 0.083405352 | Ageing_depleted |
| ENSMUSG00000002109.15 | ‘Ddb2’ | PC | 0.00963623 | 0.083938026 | Ageing_depleted |
| ENSMUSG00000037172.15 | ‘Dennd11’ | PC | 0.00977521 | 0.084497936 | Ageing_depleted |
| ENSMUSG00000101463.2 | ‘Gm28750’ | IncRNA | 0.01085931 | 0.090892192 | Ageing_depleted |
| ENSMUSG00000103831.2 | ‘Gm37608’ | TEC | 0.010991868 | 0.091325931 | Ageing_depleted |
| ENSMUSG00000028613.16 | ‘Lrp8’ | PC | 0.011595115 | 0.094603682 | Ageing_depleted |
| ENSMUSG00000066043.14 | ‘Phactr4’ | PC | 0.012068223 | 0.09695181 | Ageing_depleted |
| ENSMUSG00000033389.17 | ‘Arhgap44’ | PC | 0.012044811 | 0.09695181 | Ageing_depleted |
| ENSMUSG00000022462.8 | ‘Slc38a2’ | PC | 0.012360171 | 0.098657095 | Ageing_depleted |
| ENSMUSG00000036180.16 | ‘Gatad2a’ | PC | 4.42E−97 | 5.01E−94 | Ageing_enriched |
| ENSMUSG00000030921.18 | ‘Trim30a’ | PC | 1.94E−85 | 1.30E−82 | Ageing_enriched |
| ENSMUSG00000005534.11 | ‘Insr’ | PC | 1.97E−85 | 1.30E−82 | Ageing_enriched |
| ENSMUSG00000040265.17 | ‘Dnm3’ | PC | 1.40E−57 | 6.92E−55 | Ageing_enriched |
| ENSMUSG00000033768.18 | ‘Nrxn2’ | PC | 3.66E−55 | 1.52E−52 | Ageing_enriched |
| ENSMUSG00000112314.2 | ‘Gm49454’ | IncRNA | 1.91E−34 | 5.61E−32 | Ageing_enriched |
| ENSMUSG00000039458.16 | ‘Mtmr12’ | PC | 7.32E−34 | 2.07E−31 | Ageing_enriched |
| ENSMUSG00000091034.9 | ‘Gm17660’ | PC | 3.24E−22 | 6.93E−20 | Ageing_enriched |
| ENSMUSG00000063458.14 | ‘Lrmda’ | PC | 1.05E−21 | 2.19E−19 | Ageing_enriched |
| ENSMUSG00000101344.2 | ‘Gm29183’ | IncRNA | 2.15E−19 | 4.06E−17 | Ageing_enriched |
| ENSMUSG00000066687.6 | ‘Zbtb16’ | PC | 1.41E−18 | 2.54E−16 | Ageing_enriched |
| ENSMUSG00000022119.16 | ‘Rbm26’ | PC | 1.15E−16 | 1.72E−14 | Ageing_enriched |
| ENSMUSG00000039717.17 | ‘Ralyl’ | PC | 9.35E−16 | 1.37E−13 | Ageing_enriched |
| ENSMUSG00000062151.14 | ‘Unc13c’ | PC | 1.23E−14 | 1.65E−12 | Ageing_enriched |
| ENSMUSG00000110246.2 | ‘C130073E24Rik’ | IncRNA | 1.87E−14 | 2.47E−12 | Ageing_enriched |
| ENSMUSG00000055963.13 | ‘Triqk’ | PC | 5.43E−14 | 6.94E−12 | Ageing_enriched |
| ENSMUSG00000053279.9 | ‘Aldh1a1’ | PC | 9.97E−14 | 1.25E−11 | Ageing_enriched |
| ENSMUSG00000022123.10 | ‘Scel’ | PC | 7.93E−13 | 9.52E−11 | Ageing_enriched |
| ENSMUSG00000037921.16 | ‘Ddx60’ | PC | 7.20E−12 | 8.03E−10 | Ageing_enriched |
| ENSMUSG00000026558.14 | ‘Uck2’ | PC | 1.35E−11 | 1.40E−09 | Ageing_enriched |
| ENSMUSG00000029212.12 | ‘Gabrb1’ | PC | 2.02E−11 | 2.08E−09 | Ageing_enriched |
| ENSMUSG00000014361.6 | ‘Mertk’ | PC | 2.48E−10 | 2.43E−08 | Ageing_enriched |
| ENSMUSG00000109741.2 | ‘Gm45455’ | IncRNA | 5.80E−10 | 5.53E−08 | Ageing_enriched |
| ENSMUSG00000025314.17 | ‘Ptprj’ | PC | 1.35E−09 | 1.19E−07 | Ageing_enriched |
| ENSMUSG00000021340.14 | ‘Gpld1’ | PC | 1.48E−09 | 1.27E−07 | Ageing_enriched |
| ENSMUSG00000030075.11 | ‘Cntn3’ | PC | 2.71E−09 | 2.21E−07 | Ageing_enriched |
| ENSMUSG00000022747.18 | ‘St3gal6’ | PC | 3.77E−09 | 3.04E−07 | Ageing_enriched |
| ENSMUSG00000056966.8 | ‘Gjc3’ | PC | 8.01E−09 | 6.28E−07 | Ageing_enriched |
| ENSMUSG00000034055.17 | ‘Phka1’ | PC | 1.01E−08 | 7.74E−07 | Ageing_enriched |
| ENSMUSG00000019865.10 | ‘Nmbr’ | PC | 1.65E−08 | 1.24E−06 | Ageing_enriched |
| ENSMUSG00000040118.16 | ‘Cacna2d1’ | PC | 2.65E−08 | 1.96E−06 | Ageing_enriched |
| ENSMUSG00000115122.2 | ‘Gm49685’ | IncRNA | 7.85E−08 | 5.60E−06 | Ageing_enriched |
| ENSMUSG00000040957.16 | ‘Cables1’ | PC | 8.09E−08 | 5.72E−06 | Ageing_enriched |
| ENSMUSG00000039601.17 | ‘Rcan2’ | PC | 8.49E−08 | 5.91E−06 | Ageing_enriched |
| ENSMUSG00000028517.9 | ‘Plpp3’ | PC | 3.35E−07 | 2.07E−05 | Ageing_enriched |
| ENSMUSG00000027674.17 | ‘Pex5l’ | PC | 3.54E−07 | 2.16E−05 | Ageing_enriched |
| ENSMUSG00000019996.18 | ‘Map7’ | PC | 1.06E−06 | 5.93E−05 | Ageing_enriched |
| ENSMUSG00000007097.15 | ‘Atp1a2’ | PC | 1.16E−06 | 6.42E−05 | Ageing_enriched |
| ENSMUSG00000025474.10 | ‘Tubgcp2’ | PC | 1.23E−06 | 6.72E−05 | Ageing_enriched |
| ENSMUSG00000024998.18 | ‘Plce1’ | PC | 1.47E−06 | 7.81E−05 | Ageing_enriched |
| ENSMUSG00000037999.14 | ‘Arap2’ | PC | 2.61E−06 | 0.000132704 | Ageing_enriched |
| ENSMUSG00000033350.8 | ‘Chst2’ | PC | 2.88E−06 | 0.000145053 | Ageing_enriched |
| ENSMUSG00000100301.7 | ‘6030407O03Rik’ | IncRNA | 9.36E−06 | 0.000425995 | Ageing_enriched |
| ENSMUSG00000104785.2 | ‘Gm31121’ | IncRNA | 9.64E−06 | 0.000436219 | Ageing_enriched |
| ENSMUSG00000026888.15 | ‘Grb14’ | PC | 1.06E−05 | 0.000472257 | Ageing_enriched |
| ENSMUSG00000027864.10 | ‘Ptgfrn’ | PC | 1.36E−05 | 0.000587093 | Ageing_enriched |
| ENSMUSG00000032377.9 | ‘Plscr4’ | PC | 2.09E−05 | 0.000861721 | Ageing_enriched |
| ENSMUSG00000019820.12 | ‘Utrn’ | PC | 2.08E−05 | 0.000861721 | Ageing_enriched |
| ENSMUSG00000110723.2 | ‘Gm49353’ | PC | 3.58E−05 | 0.00142347 | Ageing_enriched |
| ENSMUSG00000020363.7 | ‘Gfpt2’ | PC | 3.61E−05 | 0.001429181 | Ageing_enriched |
| ENSMUSG00000061578.9 | ‘Ksr2’ | PC | 6.51E−05 | 0.002408377 | Ageing_enriched |
| ENSMUSG00000089941.2 | ‘Gm16168’ | IncRNA | 7.18E−05 | 0.002549189 | Ageing_enriched |
| ENSMUSG00000049420.10 | ‘Tmem200a’ | PC | 7.38E−05 | 0.002587361 | Ageing_enriched |
| ENSMUSG00000037706.18 | ‘Cd81’ | PC | 7.61E−05 | 0.002644151 | Ageing_enriched |
| ENSMUSG00000035299.17 | ‘Mid1’ | PC | 8.60E−05 | 0.002884091 | Ageing_enriched |
| ENSMUSG00000113208.2 | ‘Gm48421’ | IncRNA | 9.37E−05 | 0.003076384 | Ageing_enriched |
| ENSMUSG00000031425.16 | ‘Plp1’ | PC | 0.000102795 | 0.003255723 | Ageing_enriched |
| ENSMUSG00000030310.11 | ‘Slc6a1’ | PC | 0.000118952 | 0.003622547 | Ageing_enriched |
| ENSMUSG00000050663.9 | ‘Trhde’ | PC | 0.000133118 | 0.003964005 | Ageing_enriched |
| ENSMUSG00000026187.10 | ‘Xrcc5’ | PC | 0.000164119 | 0.004575695 | Ageing_enriched |
| ENSMUSG00000059182.9 | ‘Skap2’ | PC | 0.000187355 | 0.00506305 | Ageing_enriched |
| ENSMUSG00000109006.3 | ‘B230209E15Rik’ | IncRNA | 0.000230903 | 0.005974816 | Ageing_enriched |
| ENSMUSG00000001995.10 | ‘Sipa1l2’ | PC | 0.000251393 | 0.006400426 | Ageing_enriched |
| ENSMUSG00000052062.15 | ‘Pard3b’ | PC | 0.000309758 | 0.007712788 | Ageing_enriched |
| ENSMUSG00000054477.17 | ‘Kcnn2’ | PC | 0.000314841 | 0.007790358 | Ageing_enriched |
| ENSMUSG00000115821.2 | ‘6330576A10Rik’ | IncRNA | 0.000402382 | 0.009426209 | Ageing_enriched |
| ENSMUSG00000046768.14 | ‘Rhoj’ | PC | 0.000460485 | 0.010568454 | Ageing_enriched |
| ENSMUSG00000105068.2 | ‘Gm30835’ | IncRNA | 0.000605006 | 0.013160543 | Ageing_enriched |
| ENSMUSG00000006205.14 | ‘Htra1’ | PC | 0.000603063 | 0.013160543 | Ageing_enriched |
| ENSMUSG00000037957.15 | ‘Wdr20’ | PC | 0.000648025 | 0.013905323 | Ageing_enriched |
| ENSMUSG00000038831.17 | ‘Ralgps1’ | PC | 0.00067127 | 0.01428794 | Ageing_enriched |
| ENSMUSG00000034453.9 | ‘Polr3b’ | PC | 0.000741131 | 0.015524545 | Ageing_enriched |
| ENSMUSG00000096370.9 | ‘Gm21992’ | PC | 0.000767203 | 0.01581924 | Ageing_enriched |
| ENSMUSG00000024534.16 | ‘Sncaip’ | PC | 0.000823099 | 0.016753974 | Ageing_enriched |
| ENSMUSG00000024539.18 | ‘Ptpn2’ | PC | 0.000869798 | 0.017435598 | Ageing_enriched |
| ENSMUSG00000031027.16 | ‘Stk33’ | PC | 0.00100222 | 0.019449938 | Ageing_enriched |
| ENSMUSG00000020061.19 | ‘Mybpc1’ | PC | 0.001108769 | 0.020947576 | Ageing_enriched |
| ENSMUSG00000034235.18 | ‘Usp54’ | PC | 0.00119308 | 0.022063181 | Ageing_enriched |
| ENSMUSG00000036264.10 | ‘Fstl4’ | PC | 0.001244905 | 0.02234441 | Ageing_enriched |
| ENSMUSG00000019235.10 | ‘Rps6kl1’ | PC | 0.001231734 | 0.02234441 | Ageing_enriched |
| ENSMUSG00000057098.15 | ‘Ebf1’ | PC | 0.001357308 | 0.023620148 | Ageing_enriched |
| ENSMUSG00000037062.14 | ‘Sh3glb1’ | PC | 0.00146978 | 0.025081285 | Ageing_enriched |
| ENSMUSG00000102316.2 | ‘Gm37629’ | TEC | 0.001859806 | 0.029510906 | Ageing_enriched |
| ENSMUSG00000004360.10 | ‘9330159F19Rik’ | PC | 0.002159757 | 0.032973662 | Ageing_enriched |
| ENSMUSG00000005899.15 | ‘Smpd4’ | PC | 0.002273675 | 0.034161212 | Ageing_enriched |
| ENSMUSG00000027546.16 | ‘Atp9a’ | PC | 0.002396614 | 0.034883074 | Ageing_enriched |
| ENSMUSG00000036368.9 | ‘Rmdn2’ | PC | 0.002395621 | 0.034883074 | Ageing_enriched |
| ENSMUSG00000027695.17 | ‘Pld1’ | PC | 0.002426716 | 0.03505306 | Ageing_enriched |
| ENSMUSG00000038481.14 | ‘Cdk19’ | PC | 0.002444998 | 0.03519908 | Ageing_enriched |
| ENSMUSG00000031552.14 | ‘Adam18’ | PC | 0.002449922 | 0.035205963 | Ageing_enriched |
| ENSMUSG00000039153.18 | ‘Runx2’ | PC | 0.002527898 | 0.035615469 | Ageing_enriched |
| ENSMUSG00000070509.16 | ‘Rgma’ | PC | 0.002728281 | 0.037350515 | Ageing_enriched |
| ENSMUSG00000022788.17 | ‘Fgd4’ | PC | 0.002924409 | 0.039313188 | Ageing_enriched |
| ENSMUSG00000045100.12 | ‘Slc25a26’ | PC | 0.00307056 | 0.040588807 | Ageing_enriched |
| ENSMUSG00000073481.10 | ‘Mtarc2’ | PC | 0.003280943 | 0.042587722 | Ageing_enriched |
| ENSMUSG00000056579.19 | ‘Tug1’ | PC | 0.003692168 | 0.046111341 | Ageing_enriched |
| ENSMUSG00000102250.2 | ‘Gm38260’ | TEC | 0.003711398 | 0.046129142 | Ageing_enriched |
| ENSMUSG00000066442.18 | ‘Mthfs' | PC | 0.003875554 | 0.047079347 | Ageing_enriched |
| ENSMUSG00000024812.12 | ‘Tjp2’ | PC | 0.003888762 | 0.047081374 | Ageing_enriched |
| ENSMUSG00000040433.17 | ‘Zbtb38’ | PC | 0.004166671 | 0.049686294 | Ageing_enriched |
| ENSMUSG00000022309.10 | ‘Angpt1’ | PC | 0.005038533 | 0.05626954 | Ageing_enriched |
| ENSMUSG00000109088.2 | ‘Gm44593’ | IncRNA | 0.005099626 | 0.056552992 | Ageing_enriched |
| ENSMUSG00000042282.5 | ‘Gucy2f’ | PC | 0.00524061 | 0.057552217 | Ageing_enriched |
| ENSMUSG00000004317.15 | ‘Clcn5’ | PC | 0.005295751 | 0.057836909 | Ageing_enriched |
| ENSMUSG00000023044.3 | ‘Csad’ | PC | 0.006421775 | 0.065022525 | Ageing_enriched |
| ENSMUSG00000004040.17 | ‘Stat3’ | PC | 0.006541716 | 0.065732621 | Ageing_enriched |
| ENSMUSG00000047767.18 | ‘Atg16l2’ | PC | 0.007554165 | 0.072684641 | Ageing_enriched |
| ENSMUSG00000022469.18 | ‘Rapgef3’ | PC | 0.007591772 | 0.072951033 | Ageing_enriched |
| ENSMUSG00000030607.8 | ‘Acan’ | PC | 0.008093943 | 0.0755548 | Ageing_enriched |
| ENSMUSG00000023017.11 | ‘Asic1’ | PC | 0.008202853 | 0.076143244 | Ageing_enriched |
| ENSMUSG00000046160.7 | ‘Olig1’ | PC | 0.008252126 | 0.076239129 | Ageing_enriched |
| ENSMUSG00000030663.13 | ‘1110004F10Rik’ | PC | 0.008929043 | 0.080455684 | Ageing_enriched |
| ENSMUSG00000024513.17 | ‘Mbd2’ | PC | 0.009190469 | 0.081489511 | Ageing_enriched |
| ENSMUSG00000027287.15 | ‘Snap23’ | PC | 0.009245887 | 0.081787499 | Ageing_enriched |
| ENSMUSG00000039194.17 | ‘Rlbp1’ | PC | 0.009730984 | 0.084392042 | Ageing_enriched |
| ENSMUSG00000085631.2 | ‘9630028H03Rik’ | IncRNA | 0.009884495 | 0.085122326 | Ageing_enriched |
| ENSMUSG00000038260.11 | ‘Trpm4’ | PC | 0.010262044 | 0.087302187 | Ageing_enriched |
| ENSMUSG00000022508.6 | ‘Bcl6’ | PC | 0.010268563 | 0.087302187 | Ageing_enriched |
| ENSMUSG00000107917.2 | ‘Gm44235’ | TEC | 0.010423272 | 0.088250057 | Ageing_enriched |
| ENSMUSG00000001260.11 | ‘Gabrg1’ | PC | 0.010594864 | 0.089281937 | Ageing_enriched |
| ENSMUSG00000025931.16 | ‘Paqr8’ | PC | 0.011750938 | 0.095527646 | Ageing_enriched |
| ENSMUSG00000062234.15 | ‘Gak’ | PC | 0.01267715 | 0.099961337 | Ageing_enriched |

(PC = protein coding)

### Example 4: PerturbSci-Kinetics

[0631] The studies described here provided the first method to quantitatively characterize the genome-wide mRNA kinetic rates (e.g., synthesis and degradation rates) across hundreds of genetic perturbations in a single experiment. Furthermore, the analysis illustrates the advantages of PerturbSci-Kinetics over conventional assays that solely profile gene expression changes. By capturing three layers of readout (e.g., nascent, whole transcriptome, and sgRNA identify) at single-cell resolution, PerturbSci-Kinetics uniquely enables the dissection of the critical regulators of gene-specific transcription, splicing, and degradation in a massive-parallel manner. Finally, PerturbSci-Kinetics is built on the recently developed EasySci-RNA (Sziraki, A. et al., bioRxiv 2022.09.28.509825 (2022)) and can be easily scaled up to profiling genome-wide perturbations (e.g., 10,000 s genes or cis-regulatory elements) across tens of millions of single cells, thus enabling the systematic characterization of cell-type-specific gene regulatory network at unprecedented scale and resolution.

[0632] The Materials and Methods are now described.

### Cell Culture

[0633] The 3T3-L1-CRISPRi cell line was a gift from the Tissue Culture facility of the University of California, Berkeley, and the HEK293 cell line was a gift from the Scott Keeney Lab at Memorial Sloan Kettering Cancer Center. The HEK293T cell line was obtained from ATCC (CRL-3216). All cells were maintained at 37° C. and 5% CO2 in high glucose DMEM medium supplemented with L-Glutamine and Sodium Pyruvate (Gibco 11995065) and 10% Fetal Bovine Serum (FBS; Sigma F4135). When generating a monoclonal cell line, the medium was supplemented with 1% Penicillin-Streptomycin (Gibco 15140163). In the screening experiment, after the induction of dCas9-KRAB-MeCP2 expression by 1 ug/ml Dox (Sigma D5207), sgRNA-transduced HEK293-idCas9 cells were cultured in high glucose DMEM medium supplemented with L-Glutamine (Gibco 11965092) and 10% FBS.

### Generation of Monoclonal HEK293-idCas9 Cell Line

[0634] To generate HEK293 with Dox-inducible dCas9-KRAB-MeCP2 expression, the lentiviral plasmid Lenti-idCas9-KRAB-MeCP2-T2A-mCherry-Neo was constructed. A dCas9-KRAB-MeCP2-T2A insert was amplified from dCas9-KRAB-MeCP2 (Addgene #110821). A T2A-mCherry Gblock was synthesized by IDT. Gibson Assembly reaction (NEB E2611S) was performed at 50° C. with a mixture of Bsp119I-digested Lenti-Neo-iCas9 (Thermo FD0124; Addgene #85400), dCas9-KRAB-MeCP2-T2A amplicon, T2A-mCherry Gblock for 60 minutes to construct a dCas9-KRAB-MeCP2-T2A-mCherry plasmid. The reaction product was transformed into NEBstable competent cells (NEB C3040H), and colonies were inoculated and amplified in LB medium (Gibco 10855001) with 50 ug/ml Sodium Ampicillin (Sigma A8351) at 37° C. overnight.

[0635] After plasmid extraction (QIAGEN No. 27106) and sequencing validation, the plasmid was co-transfected with psPAX2 (Addgene #12260) and pMD2.G (Addgene #12259) into low-passage HEK293T cells in a 10 cm dish using Polyjet (SignaGen SL100688) for 24 hours. Cells were gently washed twice with PBS, then cultured in a medium with 10 mM Sodium Butyrate (Sigma TR-1008-G) for another 24 hours. The supernatant was collected, and cell debris was cleared by spinning down (5 min, 1000×g) and passed through a 0.45 μm filter. The lentivirus was concentrated 10× by the Lenti-X concentrator (TaKaRa 631231), and the virus suspension was flash frozen by Liquid Nitrogen and was stored at −80° C.

[0636] The lentivirus titer was determined by examining the ratio of mCherry+ cells after 24 hours of transduction and 48 hours of Dox induction. Polybrene (Sigma TR-1003) at a final concentration of 8 ug/ml was used to enhance the transduction efficiency. Then HEK293 cells were counted and transduced with lentivirus at MOI=0.2 for 48 hours. Cells were treated with Dox for 48 hours, and the top 10% of cells with the strongest mCherry fluorescence were sorted to each well of a 96-well plate containing 100 ul medium. After a 3-week expansion, monoclonal cells that survived were transferred to larger dishes for further expansion. The clone with inducible homogeneous strong mCherry expression and normal morphology was picked for the following experiment.

### Gene Knockdown and Efficacy Examination

[0637] To simplify the lentiviral titer measurement, CROP-seq-opti-Puro-T2A-GFP was assembled by adding a T2A-GFP downstream of Puromycin resistant protein coding sequence on the CROP-seq-opti plasmid (Addgene #106280). Flanking MluI and CsiI digestion sites were added to the GFP Gblock (IDT) by PCR. Both amplicon and CROP-seq-opti vector were digested using MluI (Thermo, FD0564) and CsiI (Thermo, FD2114) at 37° C. for 30 minutes, and were ligated at room temperature for 20 minutes using the Blunt/TA Ligase Master Mix (NEB M0367S). Transformation, clone amplification, and sequencing validation were done as stated above.

[0638] Oligos corresponding to individual guides for ligation were ordered as standard DNA oligos from IDT with the following design:

Plus strand:
5′-CACCG[20 bp sgRNA plus strand sequence]-3′
Minus strand:
5′-AAAC[20 bp sgRNA minus strand sequence]C-3′

[0639] Oligos were reconstituted into 100 μM and were mixed and phosphorylated using T4 PNK (NEB M0201S) by incubating at 37° C. for 30 minutes. The reaction was heated at 95° C. for 5 minutes and then ramped down to 25° C. by −0.1° C./second to anneal oligos into a double-stranded duplex. The CROP-seq-opti-Puro-T2A-GFP was digested by Esp3I (NEB R0734L) at 37° C. for 30 minutes, then the linearized backbone and the annealed duplex were ligated at room temperature for 20 minutes using the Blunt/TA Ligase Master Mix (NEB M0367S). Transformation, clone amplification, sequencing validation, lentivirus generation, and titer measurement were done as stated above.

[0640] For the mouse 3T3-L1-CRISPRi cells, they were counted and incubated with lentivirus inserted with either non-target control (NTC) sgRNA or sgRNA targeting an Fto gene, and 8 ug/ml of Polybrene. For the human HEK293-idCas9 cells, they were counted and incubated with NTC sgRNA or sgRNA targeting an IGF1R gene, and 8 ug/ml of Polybrene. Transduction was then performed at MOI=0.2 for 48 hours. Based on the results of the puromycin titration experiments, sgRNA-transduced 3T3-L1-CRISPRi cells were selected by 2.5 ug/ml Puromycin for 2 days and 2 ug/ml Puromycin for 3 days, and sgRNA-transduced HEK293-idCas9 cells were selected by 1.5 ug/ml Puromycin for 3 days and 1 ug/ml Puromycin for 2 days.

[0641] As dCas9-BFP-KRAB was constitutively expressed in 3T3-L1-CRISPRi cells, the target gene started being silenced once sgRNA lentivirus was introduced. For HEK293-idCas9 cells, Dox treatment for a minimum of 72 hours was required before examining the knockdown effect.

[0642] For RT-qPCR validation, primers targeting IGF1R were selected from PrimerBank (pga.mgh.harvard.edu/primerbank/) and were synthesized from IDT. Total RNA in 1e6 cells of each sample was extracted using the RNeasy Mini kit (QIAGEN 74104) and the concentration was measured by Nanodrop. 1 ug total RNA was then reverse-transcribed into the first strand cDNA by SuperScript VILO Master Mix (Thermo 11755050). PowerTrack SYBR Green Master Mix (Thermo A46109) was used for RT-qPCR following the manufacturer's instructions.

[0643] For flow cytometry validation, 1e6 cells of each sample were harvested and resuspended in 100 μl of PBS-0.1% sodium azide-2% FBS. BV421 Mouse Anti-Human CD221 (BD 565966) and BV421 Mouse IgG1 k Isotype Control (BD 562438) at the final concentration of 10 μg/ml were added, and reactions were incubated at 4° C. in the dark with rotation for 30 minutes. Cells were then washed twice using PBS-0.1% sodium azide-2% FBS, and fluorescence signals were recorded.

Construction of Pooled sgRNA Library

[0644] Genes of interest were selected manually, considering their functions and expression levels in HEK293 cells. The sgRNA sequences targeting genes of interest with the best performances were obtained from an established optimized sgRNA library (only sgRNA set A is considered) (Sanson, K. R. et al., Nat. Commun. 9, 5416 (2018)). Finally, 684 sgRNAs targeting 228 genes (3 sgRNAs/gene) and 15 additional NO-TARGET sgRNAs were included in the present study.

[0645] The single-stranded sgRNA library was synthesized in a pooled manner by IDT in the following format:

5′-GGCTTTATATATCTTGTGGAAAGGACGAAACACCG[20 bps gRNA
plus strand sequence]GTTTAAGAGCTATGCTGGAAACAGCATA
GCAAGTT-3′

[0646] 100 ng of oligo pool was amplified by PCR using primers targeting 5′ homology arm (HA) and 3′ HA with limited cycles (×12) to avoid introducing amplification biases. The PCR product was purified, and double-stranded library amplicons were extracted by DNA electrophoresis and gel extraction. Then the insert was cloned into Esp3I-digested CROP-seq-opti-Puro-T2A-GFP by Gibson Assembly (50° C. for 60 minutes). In parallel, a control Gibson Assembly reaction containing only the backbone was set. Both reactions were cleaned up by 0.75× AMPURE beads (Beckman Coulter A63882) and eluted in 5 μL EB buffer (QIAGEN 19086), then were transformed into Endura Electrocompetent Cells (Lucigen, 602422) by electroporation (Gene Pulser Xcell Electroporation System, Bio-Rad, 1652662). After 1 hour of recovery at 250 rpm, 37° C., each reaction was spread onto an in-house 245 mm Square agarose plate (Corning, 431111) with 100 ug/ml of Carbenicillin (Thermo, 10177012) and was then grown at 32° C. for 13 hours to minimize potential recombination and growth biases. All colonies from each reaction were scraped from the plate and the CROP-seq-opti-Puro-T2A-GFP-sgRNA plasmid library was extracted using ZymoPURE II Plasmid Midiprep Kit (Zymo, D4200). The lentiviral library was generated as stated above with extended virus production time.

### Library Preparation for the Bulk Screen

[0647] For each replicate, 7e6 uninduced HEK293-idCas9 cells were seeded. After 12 hours, two replicates were transduced at MOI=0.1 (1000× coverage/sgRNA) and another two replicates were transduced at MOI=0.2 (2000× coverage/sgRNA) with 8 μg/ml of Polybrene for 24 hours. Then the culture medium was replaced with the virus-free medium and culture cells for another 24 hours. Transduced cells were selected by 1.5 μg/ml of Puromycin for 3 days and 1 μg/ml of Puromycin for 2 days. During the selection, cells were passaged every 2 or 3 days to ensure at least 1000× coverage. At the end of the drug selection, 1.4e6 cells were harvested in each replicate (2000× coverage/sgRNA) as day0 samples of the bulk screen and pellet down at 500×g, 4° C. for 5 minutes. Cell pellets were stored at −80° C. for genomic DNA extraction later. Then the dCas9-KRAB-MeCP2 expression was induced by adding Dox at the final concentration of 1 μg/ml, and L-glutamine+, sodium pyruvate−, high glucose DMEM was used to sensitize cells to perturbations on energy metabolism genes. Cells were cultured in this condition for additional 7 days and were passed every other day with 4000× coverage/sgRNA. On day7, 6 ml of the original media from each plate was mixed with 6 μL of 200 mM 4sU (Sigma T4509-25 MG) dissolved in DMSO (VWR 97063-136) and was put back for nascent RNA metabolic labeling. After 2 hours of treatment, 1.4e6 cells in each replicate were harvested as day7 samples of the bulk screen, and the rest of the cells were fixed and stored for single-cell Perturb-Kinetics profiling (see the next section).

[0648] Genomic DNA of bulk screen samples was extracted using Quick-DNA Miniprep Plus Kit (Zymo, D4068T) following the manufacturer's instructions and quantified by Nanodrop. All genomic DNA was used for PCR to ensure coverage. The primer targeting the U6 promoter region with P5-15-Read1 overhang and the primer targeting the sgRNA scaffold region with P7-17-Read2 overhang was used for generating the bulk screen libraries for sequencing (Tables 11 and 12).

### Library Preparation for the PerturbSci-Kinetics

[0649] After trypsinization, cells in each 10 cm dish were collected into a 15 ml falcon tube and kept on ice. Cells were spun down at 300×g for 5 minutes (4° C.) and washed once in 3 ml ice-cold PBS. Cells were fixed with 5 ml ice-cold 4% PFA in PBS (Santa Cruz Biotechnology sc-281692) for 15 minutes on ice. PFA was then quenched by adding 250 ul 2.5M Glycine (Sigma 50046-50G), and cells were pelleted at 500×g for 5 minutes (4° C.). Fixed cells were washed once with 1 ml PBSR (PBS, 0. % SUPERase In (Thermo AM2696), and 10 mM dithiothreitol (DTT; Thermo R0861)), and were then resuspended, permeabilized, and further fixed in 1 ml PBSR-triton-BS3 (PBS, 0.1% SUPERase In, 0.2% Triton-X100 (Sigma X100-500ML), 2 mM bis(sulfosuccinimidyl) suberate (BS3; Thermo, PG82083), 10 mM DTT) for 5 minutes. Additional 4 ml of PBS-BS3 (PBS, 2 mM BS3, 10 mM DTT) was then added to dilute Triton-X100 while keeping the concentration of BS3, and cells were incubated on ice for 15 minutes. Cells were pelleted at 500×g, 4° C. for 5 minutes and resuspended in 500 ul nuclease-free water (Corning 46-000-CM) supplemented with 0.1% SUPERase In and 10 mM DTT. 3 ml of 0.05N HCl (Fisher Chemical SA54-1) was added for further permeabilization. After 3 minutes of incubation on ice, 3.5 ml Tris-HCl, pH 8.0 (Thermo 15568025), and 35 ul of 10% Triton X-100 were added to each tube to neutralize the HCl. After spinning down at 4° C., 500×g for 5 minutes, cells were finally resuspended in 400 ul PSB-DTT at the concentration of ˜2e6 cells/100 ul (PBS, 1% SUPERase In, 1% Bovine Serum Albumin (BSA; NEB B90000S), 1 mM DTT), mixed with 10% DMSO, and were slow-frozen and stored in −80° C.

[0650] The chemical conversion was performed before the library preparation. Cells were thawed with shaking in the 37° C. water bath and spun down, then were washed once with 400 ul PSB without DTT. Next, cells were resuspended in 100 ul PSB, mixed with 40 ul Sodium Phosphate buffer (PH 8.0, 500 mM), 40 ul IAA (100 mM), 20 ul nuclease-free water, and 200 ul DMSO with the order. The reaction was incubated at 50° C. for 15 minutes and was quenched by adding 8 ul 1M DTT. Then cells were washed with PBS and were filtered through a 20 μm strainer (Pluriselect‡ 43-10020-60). Cells were finally resuspended in 100 μl PSB.

### Reads Processing

[0651] For bulk screen libraries, bcl files were demultiplexed into fastq files based on index 7 barcodes. Reads for each sample were further extracted by index 5 barcode matching. Then every read pair was matched against two constant sequences (Read1: 11-25 bp, Read2: 11-25 bp) to remove reads generated from the PCR by-product. For all matching steps, a maximum of 1 mismatch is allowed. Finally, sgRNA sequences were extracted from filtered read pairs (at 26-45 bp of R1), assigned to sgRNA identities with no mismatch allowed, and read counts matrices at sgRNA and gene levels were quantified.

[0652] For PerturbSci-Kinetics transcriptome reads processing and whole-transcriptome/nascent transcriptome gene counting, the pipeline was developed based on EasySci (Sziraki, A. et al., bioRxiv 2022.09.28.509825 (2022)) and Sci-fate (Cao, J., Zhou. Et al., Nat. Biotechnol. 38, 980 988 (2020)) with minor modifications. After demultiplexing on index 7, Read1 were matched against a constant sequence on the sgRNA capture primer to remove unspecific priming, and cell barcodes and UMI sequences sequenced in Read1 were added to the headers of the fastq files of Read2, which were retained for further processing. After potential poly A sequences and low-quality bases were trimmed from Read2 by Trim Galore (Krueger, F. A wrapper around Cutadapt and FastQC to consistently apply adapter and quality trimming to FastQ files, with extra functionality for RRBS data. TrimGalore), reads were aligned to a customized reference genome consisting of a complete hg38 reference genome and the dCas9-KRAB-MeCP2 sequence from Lenti-idCas9-KRAB-MECP2-T2A-mCherry-Neo using STAR (Dobin, A. et al., Bioinformatics 29, 15-21 (2013)). Unmapped reads and reads with mapping score<30 were filtered by samtools (Danecek, P. et al., Gigascience 10, (2021)). Then deduplication at the single-cell level was performed based on the UMI sequences and the alignment location, and retained reads were split into SAM files per cell. These single-cell sam files were converted into alignment tsv files using the sam2tsv function in jvarkit (Lindenbaum, P. JVarkit: java-based utilities for Bioinformatics. (2015) doi:10.6084/m9.figshare.1425030.v1). Only reads with FLAG values of 0 or 16 and high-quality mismatches with QUAL scores>45 and CIGAR of M in them were maintained. All mutations were transformed onto the plus strand and were further filtered against background SNPs called by VarScan using in-house EasySci data on HEK293 cells. Reads in which at least 30% of mutations were T to C mismatches were identified as nascent reads, and the list of reads were extracted from single-cell whole transcriptome sam files by Picard (Picard. https://broadinstitute.github.io/picard/). Finally single-cell whole transcriptome gene x cell count matrix and nascent transcriptome gene x cell count matrix were constructed by assigning reads to genes if the aligned coordinates overlapped with the gene locations on the genome. At the same time, single cell exonic/intronic read numbers were also counted by checking whether reads were mapped to the exonic or the intronic regions of genes. To quantify dCas9-KRAB-MECP2 expression, a customized gtf file consisting of the complete hg38 genomic annotations and additional annotations for dCas9 was used in this step.

[0653] Read1 and read2 of PerturbSci-Kinetics sgRNA libraries were matched against constant sequences respectively with a maximum of 1 mismatch allowed. For each filtered read pair, cell barcode, sgRNA sequence, and UMI were extracted from designed positions. Extracted sgRNA sequences with a maximum of 1 mismatch from the sgRNA library were accepted and corrected, and the corresponding UMI was used for deduplication. Duplicates were removed by collapsing identical UMI sequences of each individual corrected sgRNA under a unique cell barcode. Cells with overall sgRNA UMI counts higher than 10 were maintained and the sgRNA x cell count matrix was constructed.

sgRNA Singlets Identification and Off-Target sgRNA Removal

[0654] Cells with at least 300 whole transcriptome UMIs and 200 genes detected, and unannotated reads ratio<40% were kept. sgRNA identities of cells were assigned and doublets were removed based on the following criteria: the cell is assigned to a single sgRNA if the most abundant sgRNA in the cell took ≥60% of total sgRNA counts and is at least 3-fold of the second most abundant sgRNA. Then whole transcriptomes and sgRNA profiles of single cells were integrated with the matched nascent transcriptomes.

[0655] Target genes with the number of cells perturbed≥50 were kept for further filtering. The knockdown efficiency was calculated at the individual sgRNA level to remove potential off-target or inefficient sgRNAs: whole transcriptome counts of all cells receiving the same sgRNA were merged, normalized by the total counts, and scaled using 1e6 as the scale factor, then the fold changes of the target gene expressions were calculated by comparing the normalized expression levels between corresponding perturbations and NTC. sgRNAs with more than 40% of target gene expression reduction relative to NTC were regarded as “effective sgRNAs”, and singlets receiving these sgRNAs were kept as “on-target cells”. Downstream analyses were done at the target gene level by analyzing all cells targeting the same gene by different sgRNAs together.

### UMAP Embedding on Pseudo-Cells

[0656] Count matrix of on-target cells of which the number of cells receiving sgRNAs targeting the same gene≥50 were loaded into Seurat, and Seurat DEGs of each perturbation compared to NTC were retrieved by FindMarkers function with default parameters. Due to the relative lower sensitivity of the wilcoxon test, the “strong perturbation” was defined as groups of cells with >1 Seurat DEGs, and manually curated the filtered perturbation gene list by putting back some target genes which have overlapped functions with strong perturbations. High-fold-change (HFC) genes between perturbations and NTC were selected: the normalized expression fold change of each gene between perturbations and NTC were calculated, and were binned based on the expression level in NTC, and top 3% of genes showing highest fold changes within each bin were selected and merged. Then selected perturbations were aggregated into pseudo-cells and normalized and scaled as stated above, and merged HFC genes from all comparisons were used as features for PCA dimension reduction. Top 9 PCs were used for UMAP embedding and default parameters were used except for the following parameters: min.dist=0.3, n.neighbors=10.

### The Experimental Results are Now Described

[0657] The key features of the new method include: (i) A novel combinatorial indexing strategy (referred to as ‘PerturbSci’) was developed for targeted enrichment and amplification of the sgRNA region that carries the same cellular barcode with the whole transcriptome (FIG. 39A). A modified CROP-seq vector system (Datlinger, P. et al., Nat. Methods 14, 297-301 (2017)) was adopted in PerturbSci to enable a direct capture of sgRNA sequences (FIG. 40). With the optimized sgRNA targeted enrichment strategy, as well as the extensive optimizations on primer designs, fixation, and reaction conditions, PerturbSci yields a high capture rate of sgRNA (i.e., over 97%), comparable to previous approaches for single-cell profiling of pooled CRISPR screens (FIG. 41-4) (Jaitin, D. A. et al., Cell 167, 1883-1896.e15 (2016); Adamson, B. et al., Cell 167, 1867-1882.e21 (2016); Dixit, A. et al., Cell 167, 1853-1866.e17 (2016); Xie, S. et al., Mol. Cell 66, 285-299.e5 (2017); Datlinger, P. et al., Nat. Methods 14, 297-301 (2017); Hill, A. J. et al., Nat. Methods 15, 271-274 (2018)). Furthermore, built on an extensively improved single-cell RNA-seq by three-level combinatorial indexing (i.e., EasySci-RNA (Yeo, N. C. et al., Nat. Methods 15, 611-616 (2018))), PerturbSci substantially reduced library preparation costs for single-cell RNA profiling of pooled CRISPR screens (FIG. 39B). In addition, to maximize the gene knockdown efficacy, a multimeric fusion protein dCas9-KRAB-MeCP2 (Erhard, F. et al., Nature 571, 419-423 (2019)), a highly potent transcriptional repressor that outperforms conventional dCas9 repressors, was used. (ii) By integrating PerturbSci with 4-thiouridine (4sU) labeling method, PerturbSci-Kinetics exhibited an order of magnitude higher throughput than the previous single-cell metabolic profiling approaches (e.g., scEU-seq, sci-fate, scNT-seq) (Hendriks, G.-J. et al., Nat. Commun. 10, 3138 (2019); Cao, J., Zhou. Et al., Nat. Biotechnol. 38, 980-988 (2020); Qiu, Q. et al., Nat. Methods 17, 991-1001 (2020); Cleary, M. D. et al., Nat. Biotechnol. 23, 232-237 (2005)). Following 4sU labeling and thiol (SH)-linked alkylation reaction (referred to as ‘chemical conversion’) (Dolken, L. et al., RNA 14, 1959-1972 (2008); Miller, C. et al., Mol. Syst. Biol. 7, 458-458 (2014); Duffy, E. E. et al., Mol. Cell 59, 858-866 (2015); Schwalb, B. et al., Science 352, 1225-1228 (2016); Rabani, M. et al., Nat. Biotechnol. 29, 436-442 (2011); Miller, M. R. et al., Nat. Methods 6, 439-441 (2009); Kawata, K. et al., Genome Res. 30, 1481-1491 (2020)), the nascent transcriptome and the whole transcriptome from the same cell can be distinguished by T to C conversion in reads mapping to mRNAs (Qiu, Q. et al., Nat. Methods 17, 991-1001 (2020)). The kinetic rate of mRNA dynamics (e.g., synthesis and degradation) were then calculated as a multi-layer readout for each genetic perturbation (FIG. 39A, Methods).

[0658] As a proof-of-concept, the approach was first tested in a mouse 3T3-L1-CRISPRi cell line transduced with a non-target control (NTC) sgRNA or sgRNA targeting an FTO gene (encoding an RNA demethylase). It was found that sgRNA expression was detected in up to 99.7% of all cells, with a median of 284 sgRNA UMI detected per cell in the optimal condition (i.e., 1 uM gRNA primer+50 uM dT primer in reverse transcription) (FIG. 41). A human HEK293 cell line with the inducible expression of dCas9-KRAB-MeCP2 (HEK293-idCas9) was then generated, and the sgRNA capture efficiency was tested using an NTC sgRNA and a sgRNA targeting the IGF-1R gene (encoding insulin-like growth factor 1 receptor). The transductions of the NTC and target sgRNAs were performed independently, such that each cell received a unique perturbation. The PerturbSci protocol was then carried out on a 1:1 mixture of cells from these two conditions. The target sgRNA expression in 97% of cells was recovered, of which 89.4% were sgRNA singlets with a median of 81 sgRNA UMIs detected per cell (FIG. 39C). Single-cell gene expression analysis confirmed the induction of dCas9 after Dox treatment and the significantly decreased IGF-1R expression in cells transduced with the target sgRNA (FIG. 39D). Strongly reduced IGF-1R mRNA and protein levels were further validated by RT-qPCR and flow cytometry (FIG. 43), indicating the high knockdown efficiency of the system.

[0659] The PerturbSci-Kinetics method was validated for capturing three-layer readout (i.e., nascent transcriptome, whole transcriptome, sgRNA identities) at the single-cell level. Following 4-thiouridine (4sU) labeling (200 uM for two hours), HEK293-idCas9 cells transduced with control or IGF1R sgRNA were mixed at a 1:1 ratio for fixation and chemical conversion. A significant enrichment of T to C mismatches was observed in mapped reads of the chemical conversion group, similar to a previous study (FIG. 39E) (Cao, J., Zhou. Et al., Nat. Biotechnol. 38, 980-988 (2020)). Also, a median of 22.1% of newly synthesized reads was recovered in labeled and chemically converted cells, compared to only 0.8% in control groups (FIG. 39F). Reassuringly, the proportion of reads mapped to exonic regions was significantly lower in newly synthesized reads compared with pre-existing reads (p-value<1e-20, Tukey's test after ANOVA) (FIG. 39G). Indeed, genes with a higher fraction of nascent reads were significantly enriched in highly dynamic biological processes such as transcription coregulator activity (q-value=5.7e-12) and protein kinase activity (q-value=2.6e-08) (FIG. 39H) (Kawata, K. et al., Genome Res. 30, 1481-1491 (2020)). By contrast, genes with a lower fraction of nascent reads were strongly enriched for processes essential for cell vitality, such as the structural constituent of ribosome (q-value=1.5e-42), unfolded protein binding (q-value=4.5e-11), and translation regulator activity (q-value=8.2e-10) (FIG. 39I). Notably, the metabolic labeling and the following chemical conversion steps are fully compatible with sgRNA detection at single-cell resolution: sgRNAs were recovered from 97% of chemically converted cells (a median of 62 sgRNA UMIs/cell), comparable to the detection efficiency in the control group (FIG. 39J-K). These analyses demonstrate the capacity of PerturbSci-Kinetics to profile both transcriptome dynamics and the associated perturbation identity at the single-cell level.

[0660] To dissect key regulators of transcriptome kinetics, a PerturbSci-Kinetics screen was performed on HEK293-idCas9 cells transduced with a library of 699 sgRNAs, containing 15 non-targeting controls (NTC) and guides targeting 228 genes involved in a variety of biological processes including mRNA transcription, processing, degradation, and others (FIG. 44A). The cloning and lentiviral packaging were performed in a pooled fashion, similar to the previous report (Joung, J. et al. Nat. Protoc. 12, 828-863 (2017)). HEK293-idCas9 cell line were then infected with the sgRNA virus library at a low multiplicity of infection (MOI) (2 repeats at MOI=0.1 and 2 repeats at MOI=0.2) to ensure most cells received only one sgRNA. After a 5-day puromycin selection to remove cells receiving no sgRNA, a fraction of cells were harvested for bulk library preparation (‘day 0’ samples). The rest of the cells were treated with Doxycycline (Dox) to induce the dCas9-KRAB-MeCP2 expression. After additional seven days for efficient gene knockdown, 4sU labeling (200 uM for two hours) was introduced and samples for both bulk and single-cell PerturbSci-Kinetics library preparation (‘day 7’ samples) were harvested. The time window for the screening period was chosen to minimize non-direct downstream transcriptional changes and population dropout (Replogle, J. M. et al., Cell 185, 2559-2575.e28 (2022)).

[0661] As expected, the induction of CRISPRi significantly changed the abundance of sgRNAs in the cell population, which is consistent between replicates and the previous study (FIG. 45) (Stuart, T. et al., Cell 177, 1888-1902.e21 (2019)). For example, the guides targeting genes involved in essential biological functions, such as DNA replication, ribosome assembly, and rRNA processing, were strongly depleted in the screen (FIG. 46). Reassuringly, the sgRNA abundance recovered by PerturbSci-kinetics strongly correlated with the bulk library (Pearson correlation r=0.988, p-value<2.2e-16) (FIG. 44C). After filtering out low-quality cells, 161,966 metabolic labeled cells were recovered, 88.1% of which had matched sgRNAs. Despite relatively low sequencing depth (17.9% of duplication rate), a median of 2,155 UMIs per cell was obtained. Most (698 out of 699) guide RNAs were detected, with a median of 28 sgRNA UMIs per cell. sgRNAs with low knockdown efficiencies (<=40% expression reduction of target genes compared with NTC) and cells assigned to multiple sgRNAs were further filtered out (FIG. 46). 98,315 cells were retained for downstream analysis, corresponding to a median of 484 cells per gene perturbation with a median of 67.7% knockdown efficiency of target genes (FIG. 44D). To further validate the gene perturbations, single-cell transcriptomes were aggregated to generate ‘pseudo-cells’ for each gene perturbation, followed by PCA dimension reduction and UMAP visualization (Qiu, X. et al., Cell 185, 690-711.e45 (2022)). Indeed, perturbations targeting paralogous genes (e.g., EXOSC5 and EXOSC6; CNOT2 and CNOT3) or related biological processes (e.g., RNA degradation, RNA splicing, oxidative phosphorylation (OXPHOS) and energy metabolism) were readily clustered together in the low dimension space (FIG. 44B).

[0662] Taking advantage of PerturbSci-Kinetics for uniquely capturing multiple layers of information, gene-specific synthesis and degradation rate were quantified in each perturbation based on an ordinary differential equation (Methods) (Qiu, X. et al., Cell 185, 690-711.e45 (2022)). As a quality control, the kinetics of genes targeted by CRISPRi were examined, which were known to function through transcriptional repression (Jones, P. L. et al., Nat. Genet. 19, 187-191 (1998); Dominguez, A. et al., Nature Reviews Molecular Cell Biology vol. 17 5-15). Indeed, these genes exhibited significantly reduced synthesis rates while their degradation rates were only mildly affected (a median reduction fold in synthesis: −2.00 vs. −0.318 in degradation; FIG. 44D-F). The impact of genetic perturbations on global mRNA synthesis and degradation rates was then investigated (Methods). As expected, the knockdown of genes involved in transcription initiation (e.g., GTF2E1, TAF2, MED21, and MNAT1), mRNA synthesis (e.g., POLK2B and POLR2K), and chromatin remodeling (e.g., SMC3, RAD21, CTCF, ARID1A) significantly down-regulated the synthesis rate, but not the degradation rate, of the global transcriptome. Interestingly, perturbations targeting components of critical biological processes such as DNA replication (e.g., POLA2, POLD1), ribosome synthesis (e.g., POLR1A, POLR1B, RPLI1, RPS15A), mRNA and protein processing (e.g., CNOT2, CNOT3, CCT3, CCT4) showed a substantial defect in both global mRNA synthesis and degradation, indicating the existence of secondary signaling circuits for maintaining overall transcriptome abundance in cells (FIG. 44G-H, FIG. 47). In addition, several genes (e.g., YY1, AGO2) were identified as potential repressors of global transcription, revealing their potential non-canonical functions (Kalantari, R., et al., Nucleic Acids Res. 44, 524-537 (2016); Nishi, K. et al., RNA 19, 17-35 (2013); Gordon, S. et al., Oncogene 25, 1125-1142 (2006)).

[0663] Besides global mRNA synthesis and degradation, the regulators of mRNA processing were further investigated by examining the ratio of nascent reads mapped to exonic regions (referred to as ‘exonic reads ratio’) for each perturbation. As expected, the knockdown of genes involved in the main steps of RNA processing, including 5′ capping (e.g., NCBP1), splicing (e.g., LSM2, LSM4, PRPF38B, HNRNPK), and 3′ cleavage and polyadenylation (e.g., CPSF2, CPSF6, NUDT21, CSTF3) resulted in a significantly lower exonic reads ratio (FIG. 44I). Also, perturbing genes involved in OXPHOS & energy metabolism (e.g., GAPDH, NDUFS2, ACO2) exhibited a significant effect on exonic reads ratio (FIG. 44I, FIG. 47), consistent with the previous reports that the mRNA processing is highly energy-dependent (Kim, S. H. et al., Proc. Natl. Acad. Sci. U.S.A 90, 888-892 (1993); Colgan, D. F. et al., Genes & Development vol. 11, 2755-2766 (1997); Kikkawa, S. et al., J. Biol. Chem. 265, 21536-21540 (1990)).

[0664] Regulators of mitochondrial mRNA turnover were then investigated by quantifying the ratio of nascent/total read counts mapped to mitochondrial genes. Notably, significantly down-regulated turnover rates of mitochondrial-specific RNA following the perturbation of multiple metabolism-related genes was observed (e.g., GAPDH, FH, PKM involved in glycolysis, ACO2 and IDH3A involved in the TCA cycle, NDUFS2 and COX6B1 involved in oxidative phosphorylation) (FIG. 44J). Furthermore, it was found that the perturbation on LRPPRC led to the most substantial defect in mitochondrial mRNA turnover (FIG. 44J) and significant expression reduction on all mitochondrial protein-coding genes (FIG. 48). Intriguingly, some mitochondrial protein-coding genes, including MT-ND6, MT-CO1, MT-ATP8, MT-ND4, MT-CYB, and MT-ATP6, are regulated at both transcription and degradation levels, consistent with the known functions of LRPPRC in regulating the life cycles of mitochondrial RNA from transcription to degradation (Colgan, D. F. et al., Genes & Development vol. 11, 2755-2766 (1997); Kikkawa, S. et al., J. Biol. Chem. 265, 21536-21540 (1990); Pajak, A. et al., PLOS Genet. 15, e1008240 (2019)). For example, 39 nuclear-encoded differentially expressed genes (DEGs) were significantly perturbed at the transcription level, while only nine were regulated by degradation following LRPPRC knockdown. Upon closer inspection of promoter regions of these genes, a significant enrichment of motifs from ATF4 and CEBPG was observed, both of which were substantially down-regulated in LRPPRC knockdown cells (FIG. 48). ATF4 and CEGPG have been reported as core transcriptional activators involved in stress sensing, suggesting their potential roles as downstream regulators of LRPPRC (Liu, L. et al., J. Biol. Chem. 286, 41253-41264 (2011))

[0665] Extending on the above analysis, the gene-specific synthesis and degradation regulation across all gene perturbations was examined. Among all 14,618 DEGs identified in the study, 31.3% of DEGs exhibited significant changes in synthesis rates (19.3%), degradation rates (7.8%) or both (4.2%), suggesting complex mechanisms controlling gene expression upon genetic perturbations (Ruzzenente, B. et al., EMBO J. 31, 443-456 (2012)). For some perturbations, including genes involved in mRNA surveillance/processing (e.g., UPF1, UPF2, SMG5, SMG7 in nonsense-mediated mRNA decay pathway; EXOSC2, EXOSC5, EXOSC6 in RNA exosome; CSTF3, CPSF2, CPSF6, NUDT21, XRN2 for 3′ polyadenylation; RNMT, NCBP1 related to 5′ RNA capping) (FIG. 44L-M), their associated DEGs are mainly regulated through degradation as expected. By contrast, other perturbations may lead to more complex scenarios. For example, the knockdown of two critical regulators in the microRNA (miRNA) pathway (i.e., DROSHA and DICER1) (García-Martinez, J. et al., Nucleic Acids Res. 44, 3643-3658 (2016); Siira, S. J. et al., Nat. Commun. 8, 1532 (2017); Pakos-Zebrucka, K. et al., EMBO Rep. 17, 1374-1395 (2016)) resulted in highly overlapped DEGs that were regulated through distinct mechanisms (FIG. 44N-O, FIG. 49). Part of the up-regulated genes (FDR of 0.05, e.g., TMEM245, PRTG, TNRC6A) is regulated by significantly decreased degradation rates, while others were regulated mostly at the transcription level. These genes include known regulators of miRNA host genes (e.g., MIR181A1HG, FTX), miRNA maturation (e.g., DDX3X), and the RNA degradation machinery (e.g., TNRC6A) (Buccitelli, C. et al., Nat. Rev. Genet. 21, 630-644 (2020); Chipman, L. B. et al., Trends Genet. 35, 215-222 (2019); Treiber, T. et al., Nat. Rev. Mol. Cell Biol. 20, 5-20 (2019); Kim, Y.-K. et al., Proc. Natl. Acad. Sci. U.S.A 113, E1881-9 (2016)), suggesting a compensatory circuit for maintaining the overall miRNA/mRNA homeostasis (FIG. 44Q). To explore the underlying regulatory mechanisms, the gene-specific binding patterns of Ago2 was examined, one of the core components in miRNA-mediated silencing complex (RISC) for targeted mRNA binding and degradation (Liu, B. et al., Brief. Funct. Genomics 18, 255-266 (2018)). Indeed, Ago2 binding was strongly enriched in the first gene set with dysregulated degradation following perturbations of the miRNA pathway. The detected binding signal was primarily enriched in the 5′ and 3′ untranslated regions (UTR), consistent with prior reports (FIG. 44P) (Chureau, C. et al., Hum. Mol. Genet. 20, 705-718 (2011); Siira, S. J. et al., Nat. Commun. 8, 1532 (2017)). For comparison, there was not a detection of strong enrichment of Ago2 binding in the second gene set that exhibited up-regulated transcriptional rates upon perturbations, consistent with the result that these genes are regulated at the transcriptional level. In summary, the above analysis demonstrates the unique capacity of PerturbSci-Kinetics for inferring the underlying regulatory mechanisms associated with gene expression changes in genetic perturbations.

TABLE 11
sgRNA Capture Primers

| | | SEQ ID | | SEQ ID |
|---|---|---|---|---|
| Name | Sequence | NO: | Barcode | NO: |
| sciNEXT_RT- | /5Phos/ACGACGCTCTTCCGATCTNNNNNNNNT | 2305 | TTCTCGCATG | 193 |
| gRNA_targeted_plate1_01 | TCTCGCATGCAAGTTGATAACGGACTAGCC | | | |
| sciNEXT_RT- | /5Phos/ACGACGCTCTTCCGATCTNNNNNNNNT | 2306 | TCCTACCAGT | 194 |
| gRNA_targeted_plate1_02 | CCTACCAGTCAAGTTGATAACGGACTAGCC | | | |
| sciNEXT_RT- | /5Phos/ACGACGCTCTTCCGATCTNNNNNNNNG | 2307 | GCGTTGGAGC | 195 |
| gRNA_targeted_plate1_03 | CGTTGGAGCCAAGTTGATAACGGACTAGCC | | | |
| sciNEXT_RT- | /5Phos/ACGACGCTCTTCCGATCTNNNNNNNNG | 2308 | GATCTTACGC | 196 |
| gRNA_targeted_plate1_04 | ATCTTACGCCAAGTTGATAACGGACTAGCC | | | |
| sciNEXT_RT- | /5Phos/ACGACGCTCTTCCGATCTNNNNNNNNC | 2309 | CTGATGGTCA | 197 |
| gRNA_targeted_plate1_05 | TGATGGTCACAAGTTGATAACGGACTAGCC | | | |
| sciNEXT_RT- | /5Phos/ACGACGCTCTTCCGATCTNNNNNNNNC | 2310 | CCGAGAATCC | 198 |
| gRNA_targeted_plate1_06 | CGAGAATCCCAAGTTGATAACGGACTAGCC | | | |
| sciNEXT_RT- | /5Phos/ACGACGCTCTTCCGATCTNNNNNNNNG | 2311 | GCCGCAACGA | 199 |
| gRNA_targeted_plate1_07 | CCGCAACGACAAGTTGATAACGGACTAGCC | | | |
| sciNEXT_RT- | /5Phos/ACGACGCTCTTCCGATCTNNNNNNNNT | 2312 | TGAGTCTGGC | 200 |
| gRNA_targeted_plate1_08 | GAGTCTGGCCAAGTTGATAACGGACTAGCC | | | |
| sciNEXT_RT- | /5Phos/ACGACGCTCTTCCGATCTNNNNNNNNT | 2313 | TGCGGACCTA | 201 |
| gRNA_targeted_plate1_09 | GCGGACCTACAAGTTGATAACGGACTAGCC | | | |
| sciNEXT_RT- | /5Phos/ACGACGCTCTTCCGATCTNNNNNNNNA | 2314 | ACCTCGTTGA | 202 |
| gRNA_targeted_plate1_10 | CCTCGTTGACAAGTTGATAACGGACTAGCC | | | |
| sciNEXT_RT- | /5Phos/ACGACGCTCTTCCGATCTNNNNNNNNA | 2315 | ACGGAGGCG | 203 |
| gRNA_targeted_platel_11 | CGGAGGCGGCAAGTTGATAACGGACTAGCC | | G | |
| sciNEXT_RT- | /5Phos/ACGACGCTCTTCCGATCTNNNNNNNNT | 2316 | TAGATCTACT | 204 |
| gRNA_targeted_plate1_12 | AGATCTACTCAAGTTGATAACGGACTAGCC | | | |
| sciNEXT_RT- | /5Phos/ACGACGCTCTTCCGATCTNNNNNNNNA | 2317 | AATTAAGACT | 205 |
| gRNA_targeted_plate1_13 | ATTAAGACTCAAGTTGATAACGGACTAGCC | | | |
| sciNEXT_RT- | /5Phos/ACGACGCTCTTCCGATCTNNNNNNNNC | 2318 | CCATTGCGTT | 206 |
| gRNA_targeted_plate1_14 | CATTGCGTTCAAGTTGATAACGGACTAGCC | | | |
| sciNEXT_RT- | /5Phos/ACGACGCTCTTCCGATCTNNNNNNNNT | 2319 | TTATTCATTC | 207 |
| gRNA_targeted_platel_15 | TATTCATTCCAAGTTGATAACGGACTAGCC | | | |
| sciNEXT_RT- | /5Phos/ACGACGCTCTTCCGATCTNNNNNNNNA | 2320 | ATCTCCGAAC | 208 |
| gRNA_targeted_plate1_16 | TCTCCGAACCAAGTTGATAACGGACTAGCC | | | |
| sciNEXT_RT- | /5Phos/ACGACGCTCTTCCGATCTNNNNNNNNT | 2321 | TTGACTTCAG | 209 |
| gRNA_targeted_plate1_17 | TGACTTCAGCAAGITGATAACGGACTAGCC | | | |
| sciNEXT_RT- | /5Phos/ACGACGCTCTTCCGATCTNNNNNNNNG | 2322 | GGCAGGTATT | 210 |
| gRNA_targeted_plate1_18 | GCAGGTATTCAAGTTGATAACGGACTAGCC | | | |
| sciNEXT_RT- | /5Phos/ACGACGCTCTTCCGATCTNNNNNNNNA | 2323 | AGAGCTATAA | 211 |
| gRNA_targeted_plate1_19 | GAGCTATAACAAGTTGATAACGGACTAGCC | | | |
| sciNEXT_RT- | /5Phos/ACGACGCTCTTCCGATCTNNNNNNNNC | 2324 | CTAAGAGAAG | 212 |
| gRNA_targeted_plate1_20 | TAAGAGAAGCAAGTTGATAACGGACTAGCC | | | |
| sciNEXT_RT- | /5Phos/ACGACGCTCTTCCGATCTNNNNNNNNA | 2325 | ACTCAATAGG | 213 |
| gRNA_targeted_plate1_21 | CTCAATAGGCAAGTTGATAACGGACTAGCC | | | |
| sciNEXT_RT- | /5Phos/ACGACGCTCTTCCGATCTNNNNNNNNC | 2326 | CTTGCGCCGC | 214 |
| gRNA_targeted_platel_22 | TTGCGCCGCCAAGTTGATAACGGACTAGCC | | | |
| sciNEXT_RT- | /5Phos/ACGACGCTCTTCCGATCTNNNNNNNNA | 2327 | AATCGTAGCG | 215 |
| gRNA_targeted_plate1_23 | ATCGTAGCGCAAGTTGATAACGGACTAGCC | | | |
| sciNEXT_RT- | /5Phos/ACGACGCTCTTCCGATCTNNNNNNNNG | 2328 | GGTACTGCCT | 216 |
| gRNA_targeted_plate1_24 | GTACTGCCTCAAGTTGATAACGGACTAGCC | | | |
| sciNEXT_RT- | /5Phos/ACGACGCTCTTCCGATCTNNNNNNNNT | 2329 | TAGAATTAAC | 217 |
| gRNA_targeted_plate1_25 | AGAATTAACCAAGTTGATAACGGACTAGCC | | | |
| sciNEXT_RT- | /5Phos/ACGACGCTCTTCCGATCTNNNNNNNNG | 2330 | GCCATTCTCC | 218 |
| gRNA_targeted_plate1_26 | CCATTCTCCCAAGTTGATAACGGACTAGCC | | | |
| sciNEXT_RT- | /5Phos/ACGACGCTCTTCCGATCTNNNNNNNNT | 2331 | TGCCGGCAGA | 219 |
| gRNA_targeted_plate1_27 | GCCGGCAGACAAGTTGATAACGGACTAGCC | | | |
| sciNEXT_RT- | /5Phos/ACGACGCTCTTCCGATCTNNNNNNNNT | 2332 | TTACCGAGGC | 220 |
| gRNA_targeted_platel_28 | TACCGAGGCCAAGTTGATAACGGACTAGCC | | | |
| sciNEXT_RT- | /5Phos/ACGACGCTCTTCCGATCTNNNNNNNNA | 2333 | ATCATATTAG | 221 |
| gRNA_targeted_platel_29 | TCATATTAGCAAGTTGATAACGGACTAGCC | | | |
| sciNEXT_RT- | /5Phos/ACGACGCTCTTCCGATCTNNNNNNNNT | 2334 | TGGTCAGCCA | 222 |
| gRNA_targeted_plate1_30 | GGTCAGCCACAAGTTGATAACGGACTAGCC | | | |
| sciNEXT_RT- | /5Phos/ACGACGCTCTTCCGATCTNNNNNNNNA | 2335 | ACTATGCAAT | 223 |
| gRNA_targeted_plate1_31 | CTATGCAATCAAGTTGATAACGGACTAGCC | | | |
| sciNEXT_RT- | /5Phos/ACGACGCTCTTCCGATCTNNNNNNNNC | 2336 | CGACGCGACT | 224 |
| gRNA_targeted_plate1_32 | GACGCGACTCAAGTTGATAACGGACTAGCC | | | |
| sciNEXT_RT- | /5Phos/ACGACGCTCTTCCGATCTNNNNNNNNG | 2337 | GATACGGAAC | 225 |
| gRNA_targeted_plate1_33 | ATACGGAACCAAGTTGATAACGGACTAGCC | | | |
| sciNEXT_RT- | /5Phos/ACGACGCTCTTCCGATCTNNNNNNNNT | 2338 | TTATCCGGAT | 226 |
| gRNA_targeted_plate1_34 | TATCCGGATCAAGTTGATAACGGACTAGCC | | | |
| sciNEXT_RT- | /5Phos/ACGACGCTCTTCCGATCTNNNNNNNNT | 2339 | TAGAGTAATA | 227 |
| gRNA_targeted_plate1_35 | AGAGTAATACAAGTTGATAACGGACTAGCC | | | |
| sciNEXT_RT- | /5Phos/ACGACGCTCTTCCGATCTNNNNNNNNG | 2340 | GCAGGTCCGT | 228 |
| gRNA_targeted_plate1_36 | CAGGTCCGTCAAGTTGATAACGGACTAGCC | | | |
| sciNEXT_RT- | /5Phos/ACGACGCTCTTCCGATCTNNNNNNNNT | 2341 | TCGGCCTTAC | 229 |
| gRNA_targeted_plate1_37 | CGGCCTTACCAAGTTGATAACGGACTAGCC | | | |
| sciNEXT_RT- | /5Phos/ACGACGCTCTTCCGATCTNNNNNNNNA | 2342 | AGAACGTCTC | 230 |
| gRNA_targeted_plate1_38 | GAACGTCTCCAAGTTGATAACGGACTAGCC | | | |
| sciNEXT_RT- | /5Phos/ACGACGCTCTTCCGATCTNNNNNNNNC | 2343 | CCAGTTCCAA | 231 |
| gRNA_targeted_plate1_39 | CAGTTCCAACAAGTTGATAACGGACTAGCC | | | |
| sciNEXT_RT- | /5Phos/ACGACGCTCTTCCGATCTNNNNNNNNG | 2344 | GGCGTTAAGG | 232 |
| gRNA_targeted_platel_40 | GCGTTAAGGCAAGTTGATAACGGACTAGCC | | | |
| sciNEXT_RT- | /5Phos/ACGACGCTCTTCCGATCTNNNNNNNNA | 2345 | ACTTAACCTT | 233 |
| gRNA_targeted_plate1_41 | CTTAACCTTCAAGTTGATAACGGACTAGCC | | | |
| sciNEXT_RT- | /5Phos/ACGACGCTCTTCCGATCTNNNNNNNNC | 2346 | CAACCGCTAA | 234 |
| gRNA_targeted_plate1_42 | AACCGCTAACAAGTTGATAACGGACTAGCC | | | |
| sciNEXT_RT- | /5Phos/ACGACGCTCTTCCGATCTNNNNNNNNG | 2347 | GACCTTGATA | 235 |
| gRNA_targeted_plate1_43 | ACCTTGATACAAGTTGATAACGGACTAGCC | | | |
| sciNEXT_RT- | /5Phos/ACGACGCTCTTCCGATCTNNNNNNNNT | 2348 | TCTGATACCA | 236 |
| gRNA_targeted_plate1_44 | CTGATACCACAAGTTGATAACGGACTAGCC | | | |
| sciNEXT_RT- | /5Phos/ACGACGCTCTTCCGATCTNNNNNNNNG | 2349 | GAAGATCGAG | 237 |
| gRNA_targeted_plate1_45 | AAGATCGAGCAAGTTGATAACGGACTAGCC | | | |
| sciNEXT_RT- | /5Phos/ACGACGCTCTTCCGATCTNNNNNNNNA | 2350 | AGGAGCGGTA | 238 |
| gRNA_targeted_plate1_46 | GGAGCGGTACAAGTTGATAACGGACTAGCC | | | |
| sciNEXT_RT- | /5Phos/ACGACGCTCTTCCGATCTNNNNNNNNA | 2351 | AAGAAGCTAG | 239 |
| gRNA_targeted_plate1_47 | AGAAGCTAGCAAGTTGATAACGGACTAGCC | | | |
| sciNEXT_RT- | /5Phos/ACGACGCTCTTCCGATCTNNNNNNNNT | 2352 | TCCGGCCTCG | 240 |
| gRNA_targeted_plate1_48 | CCGGCCTCGCAAGTTGATAACGGACTAGCC | | | |
| sciNEXT_RT- | /5Phos/ACGACGCTCTTCCGATCTNNNNNNNNA | 2353 | AGAGAAGGTT | 241 |
| gRNA_targeted_plate1_49 | GAGAAGGTTCAAGTTGATAACGGACTAGCC | | | |
| sciNEXT_RT- | /5Phos/ACGACGCTCTTCCGATCTNNNNNNNNC | 2354 | CATACTCCGA | 242 |
| gRNA_targeted_plate1_50 | ATACTCCGACAAGTTGATAACGGACTAGCC | | | |
| sciNEXT_RT- | /5Phos/ACGACGCTCTTCCGATCTNNNNNNNNG | 2355 | GCTAACTTGC | 243 |
| gRNA_targeted_plate1_51 | CTAACTTGCCAAGTTGATAACGGACTAGCC | | | |
| sciNEXT_RT- | /5Phos/ACGACGCTCTTCCGATCTNNNNNNNNA | 2356 | AATCCATCTT | 244 |
| gRNA_targeted_plate1_52 | ATCCATCTTCAAGTTGATAACGGACTAGCC | | | |
| sciNEXT_RT- | /5Phos/ACGACGCTCTTCCGATCTNNNNNNNNG | 2357 | GGCTGAGCTC | 245 |
| gRNA_targeted_plate1_53 | GCTGAGCTCCAAGTTGATAACGGACTAGCC | | | |
| sciNEXT_RT- | /5Phos/ACGACGCTCTTCCGATCTNNNNNNNNC | 2358 | CCGATTCCTG | 246 |
| gRNA_targeted_plate1_54 | CGATTCCTGCAAGTTGATAACGGACTAGCC | | | |
| sciNEXT_RT- | /5Phos/ACGACGCTCTTCCGATCTNNNNNNNNA | 2359 | ACCGCCAACC | 247 |
| gRNA_targeted_plate1_55 | CCGCCAACCCAAGTTGATAACGGACTAGCC | | | |
| sciNEXT_RT- | /5Phos/ACGACGCTCTTCCGATCTNNNNNNNNT | 2360 | TGGCCTGAAG | 248 |
| gRNA_targeted_plate1_56 | GGCCTGAAGCAAGTTGATAACGGACTAGCC | | | |
| sciNEXT_RT- | /5Phos/ACGACGCTCTTCCGATCTNNNNNNNNA | 2361 | AACCTCATTC | 249 |
| gRNA_targeted_plate1_57 | ACCTCATTCCAAGTTGATAACGGACTAGCC | | | |
| sciNEXT_RT- | /5Phos/ACGACGCTCTTCCGATCTNNNNNNNNA | 2362 | ATAAGGAGCA | 250 |
| gRNA_targeted_plate1_58 | TAAGGAGCACAAGTTGATAACGGACTAGCC | | | |
| sciNEXT_RT- | /5Phos/ACGACGCTCTTCCGATCTNNNNNNNNC | 2363 | CGAACGCCGG | 251 |
| gRNA_targeted_plate1_59 | GAACGCCGGCAAGTTGATAACGGACTAGCC | | | |
| sciNEXT_RT- | /5Phos/ACGACGCTCTTCCGATCTNNNNNNNNG | 2364 | GGTATGCTTG | 252 |
| gRNA_targeted_plate1_60 | GTATGCTTGCAAGTTGATAACGGACTAGCC | | | |
| sciNEXT_RT- | /5Phos/ACGACGCTCTTCCGATCTNNNNNNNNA | 2365 | AACCTGCGTA | 253 |
| gRNA_targeted_plate1_61 | ACCTGCGTACAAGTTGATAACGGACTAGCC | | | |
| sciNEXT_RT- | /5Phos/ACGACGCTCTTCCGATCTNNNNNNNNG | 2366 | GGCAGACGCC | 254 |
| gRNA_targeted_plate1_62 | GCAGACGCCCAAGTTGATAACGGACTAGCC | | | |
| sciNEXT_RT- | /5Phos/ACGACGCTCTTCCGATCTNNNNNNNNT | 2367 | TAGCCGTCAT | 255 |
| gRNA_targeted_plate1_63 | AGCCGTCATCAAGTTGATAACGGACTAGCC | | | |
| sciNEXT_RT- | /5Phos/ACGACGCTCTTCCGATCTNNNNNNNNC | 2368 | CCTGGAAGAG | 256 |
| gRNA_targeted_plate1_64 | CTGGAAGAGCAAGTTGATAACGGACTAGCC | | | |
| sciNEXT_RT- | /5Phos/ACGACGCTCTTCCGATCTNNNNNNNNG | 2369 | GGAGGTTCTA | 257 |
| gRNA_targeted_plate1_65 | GAGGTTCTACAAGTTGATAACGGACTAGCC | | | |
| sciNEXT_RT- | /5Phos/ACGACGCTCTTCCGATCTNNNNNNNNC | 2370 | CTAGTAGTCT | 258 |
| gRNA_targeted_plate1_66 | TAGTAGTCTCAAGTTGATAACGGACTAGCC | | | |
| sciNEXT_RT- | /5Phos/ACGACGCTCTTCCGATCTNNNNNNNNA | 2371 | ATCATCAACG | 259 |
| gRNA_targeted_plate1_67 | TCATCAACGCAAGTTGATAACGGACTAGCC | | | |
| sciNEXT_RT- | /5Phos/ACGACGCTCTTCCGATCTNNNNNNNNA | 2372 | ACGCGAGATT | 260 |
| gRNA_targeted_plate1_68 | CGCGAGATTCAAGTTGATAACGGACTAGCC | | | |
| sciNEXT_RT- | /5Phos/ACGACGCTCTTCCGATCTNNNNNNNNG | 2373 | GAAGAGGCAT | 261 |
| gRNA_targeted_plate1_69 | AAGAGGCATCAAGTTGATAACGGACTAGCC | | | |
| sciNEXT_RT- | /5Phos/ACGACGCTCTTCCGATCTNNNNNNNNG | 2374 | GGTATCCGCC | 262 |
| gRNA_targeted_plate1_70 | GTATCCGCCCAAGTTGATAACGGACTAGCC | | | |
| sciNEXT_RT- | /5Phos/ACGACGCTCTTCCGATCTNNNNNNNNA | 2375 | AACTAGGCGC | 263 |
| gRNA_targeted_plate1_71 | ACTAGGCGCCAAGTTGATAACGGACTAGCC | | | |
| sciNEXT_RT- | /5Phos/ACGACGCTCTTCCGATCTNNNNNNNNT | 2376 | TCGCTAAGCA | 264 |
| gRNA_targeted_plate1_72 | CGCTAAGCACAAGTTGATAACGGACTAGCC | | | |
| sciNEXT_RT- | /5Phos/ACGACGCTCTTCCGATCTNNNNNNNNT | 2377 | TATATACTAA | 265 |
| gRNA_targeted_plate1_73 | ATATACTAACAAGTTGATAACGGACTAGCC | | | |
| sciNEXT_RT- | /5Phos/ACGACGCTCTTCCGATCTNNNNNNNNA | 2378 | ACTTGCTAGA | 266 |
| gRNA_targeted_plate1_74 | CTTGCTAGACAAGTTGATAACGGACTAGCC | | | |
| sciNEXT_RT- | /5Phos/ACGACGCTCTTCCGATCTNNNNNNNNA | 2379 | AACCATTGGA | 267 |
| gRNA_targeted_plate1_75 | ACCATTGGACAAGTTGATAACGGACTAGCC | | | |
| sciNEXT_RT- | /5Phos/ACGACGCTCTTCCGATCTNNNNNNNNT | 2380 | TCGCGGTTGG | 268 |
| gRNA_targeted_plate1_76 | CGCGGTTGGCAAGTTGATAACGGACTAGCC | | | |
| sciNEXT_RT- | /5Phos/ACGACGCTCTTCCGATCTNNNNNNNNC | 2381 | CGTAGTTACC | 269 |
| gRNA_targeted_plate1_77 | GTAGTTACCCAAGTTGATAACGGACTAGCC | | | |
| sciNEXT_RT- | /5Phos/ACGACGCTCTTCCGATCTNNNNNNNNT | 2382 | TCCAATCATC | 270 |
| gRNA_targeted_plate1_78 | CCAATCATCCAAGTTGATAACGGACTAGCC | | | |
| sciNEXT_RT- | /5Phos/ACGACGCTCTTCCGATCTNNNNNNNNA | 2383 | AATCGATAAT | 271 |
| gRNA_targeted_plate1_79 | ATCGATAATCAAGTTGATAACGGACTAGCC | | | |
| sciNEXT_RT- | /5Phos/ACGACGCTCTTCCGATCTNNNNNNNNC | 2384 | CCATTATCTA | 272 |
| gRNA_targeted_plate1_80 | CATTATCTACAAGTTGATAACGGACTAGCC | | | |
| sciNEXT_RT- | /5Phos/ACGACGCTCTTCCGATCTNNNNNNNNT | 2385 | TCAACGTAAG | 273 |
| gRNA_targeted_plate1_81 | CAACGTAAGCAAGTTGATAACGGACTAGCC | | | |
| sciNEXT_RT- | /5Phos/ACGACGCTCTTCCGATCTNNNNNNNNT | 2386 | TCTAATAGTA | 274 |
| gRNA_targeted_plate1_82 | CTAATAGTACAAGTTGATAACGGACTAGCC | | | |
| sciNEXT_RT- | /5Phos/ACGACGCTCTTCCGATCTNNNNNNNNA | 2387 | AACCGCTGGT | 275 |
| gRNA_targeted_plate1_83 | ACCGCTGGTCAAGTTGATAACGGACTAGCC | | | |
| sciNEXT_RT- | /5Phos/ACGACGCTCTTCCGATCTNNNNNNNNG | 2388 | GATCGCTTCT | 276 |
| gRNA_targeted_plate1_84 | ATCGCTTCTCAAGTTGATAACGGACTAGCC | | | |
| sciNEXT_RT- | /5Phos/ACGACGCTCTTCCGATCTNNNNNNNNC | 2389 | CTAACTAGAT | 277 |
| gRNA_targeted_plate1_85 | TAACTAGATCAAGTTGATAACGGACTAGCC | | | |
| sciNEXT_RT- | /5Phos/ACGACGCTCTTCCGATCTNNNNNNNNG | 2390 | GCTGGAACTT | 278 |
| gRNA_targeted_platel_86 | CTGGAACTTCAAGTTGATAACGGACTAGCC | | | |
| sciNEXT_RT- | /5Phos/ACGACGCTCTTCCGATCTNNNNNNNNA | 2391 | AGGTTAGTTC | 279 |
| gRNA_targeted_plate1_87 | GGTTAGTTCCAAGTTGATAACGGACTAGCC | | | |
| sciNEXT_RT- | /5Phos/ACGACGCTCTTCCGATCTNNNNNNNNC | 2392 | CATTCGACGG | 280 |
| gRNA_targeted_plate1_88 | ATTCGACGGCAAGTTGATAACGGACTAGCC | | | |
| sciNEXT_RT- | /5Phos/ACGACGCTCTTCCGATCTNNNNNNNNC | 2393 | CATTCAATCA | 281 |
| gRNA_targeted_plate1_89 | ATTCAATCACAAGTTGATAACGGACTAGCC | | | |
| sciNEXT_RT- | /5Phos/ACGACGCTCTTCCGATCTNNNNNNNNC | 2394 | CGGATTAGAA | 282 |
| gRNA_targeted_plate1_90 | GGATTAGAACAAGTTGATAACGGACTAGCC | | | |
| sciNEXT_RT- | /5Phos/ACGACGCTCTTCCGATCTNNNNNNNNA | 2395 | ATCGGCTATC | 283 |
| gRNA_targeted_plate1_91 | TCGGCTATCCAAGTTGATAACGGACTAGCC | | | |
| sciNEXT_RT- | /5Phos/ACGACGCTCTTCCGATCTNNNNNNNNC | 2396 | CCTTGATCGT | 284 |
| gRNA_targeted_plate1_92 | CTTGATCGTCAAGTTGATAACGGACTAGCC | | | |
| sciNEXT_RT- | /5Phos/ACGACGCTCTTCCGATCTNNNNNNNNA | 2397 | ACGAAGTCAA | 285 |
| gRNA_targeted_plate1_93 | CGAAGTCAACAAGTTGATAACGGACTAGCC | | | |
| sciNEXT_RT- | /5Phos/ACGACGCTCTTCCGATCTNNNNNNNNT | 2398 | TTACCTCGAC | 286 |
| gRNA_targeted_plate1_94 | TACCTCGACCAAGTTGATAACGGACTAGCC | | | |
| sciNEXT_RT- | /5Phos/ACGACGCTCTTCCGATCTNNNNNNNNG | 2399 | GGAGGATAGC | 287 |
| gRNA_targeted_plate1_95 | GAGGATAGCCAAGTTGATAACGGACTAGCC | | | |
| sciNEXT_RT- | /5Phos/ACGACGCTCTTCCGATCTNNNNNNNNG | 2400 | GGCTCTCTAT | 288 |
| gRNA_targeted_plate1_96 | GCTCTCTATCAAGTTGATAACGGACTAGCC | | | |

TABLE 12
sgRNA inner i7 primer

| | SEQ ID | | SEQ ID |
|---|---|---|---|
| Sequence | NO: | Barcode | NO: |
| CGTGTGCTCTTCCGATCTTCGGATTCGGatcttgtggaaaggacgaaaCACCG | 2401 | TCGGATTCGG | 1932 |
| CGTGTGCTCTTCCGATCTCTAAGCCTTGatcttgtggaaaggacgaaaCACCG | 2402 | CTAAGCCTTG | 1933 |
| CGTGTGCTCTTCCGATCTCTAACTAGGTatcttgtggaaaggacgaaaCACCG | 2403 | CTAACTAGGT | 1934 |
| CGTGTGCTCTTCCGATCTGCAAGACCGTatcttgtggaaaggacgaaaCACCG | 2404 | GCAAGACCGT | 1935 |
| CGTGTGCTCTTCCGATCTATGGAACGAAatcttgtggaaaggacgaaaCACCG | 2405 | ATGGAACGAA | 1936 |
| CGTGTGCTCTTCCGATCTTAGAGGCGTTatcttgtggaaaggacgaaaCACCG | 2406 | TAGAGGCGTT | 1937 |
| CGTGTGCTCTTCCGATCTGCATCGTATGatcttgtggaaaggacgaaaCACCG | 2407 | GCATCGTATG | 1938 |
| CGTGTGCTCTTCCGATCTTGGACGACTAatcttgtggaaaggacgaaaCACCG | 2408 | TGGACGACTA | 1939 |

### Example 5: Design

Single stranded sgRNA oligo for synthesis
5′-(SEQ ID NO: 2409)GGCTTTATATATCTTGTGGAAAGGACGAAACACCG
[20 bp sgRNA plus strand sequence]GTTTAAGAGCTATGCTGGAAACAGCATAGCAAGTT
(SEQ ID NO: 2410)-3′
Single gene knockdown cloning oligos for synthesis
plus strand
5′-CACCG[20 bp sgRNA plus strand sequence]-3′
minus strand
5′-AAAC[20 bp sgRNA minus strand sequence]C-3′
sgRNA readout capture RT primer
5′-(SEQ ID NO: 2411)/5Phos/ACGACGCTCTTCCGATCT[8 bp UMI][10 bp RT
barcode]CAAGTTGATAACGGACTAGCC-(SEQ ID NO: 2412)-3′
EasySci shortdT RT primer
-(SEQ ID NO: 2413)5′-/5Phos/ACGACGCTCTTCCGATCT[8 bp UMI][10bp RT
barcode]TTTTTTTTTTTTTTT-3′-(SEQ ID NO: 2414)
EasySci indexed ligation oligos
5′-(SEQ ID NO: 2415)AATGATACGGCGACCACCGAGATCTACAC[10 bp ligation
barcode]ACACTCTTTCCCTAC-3′ (SEQ ID NO: 2416)
Easy Sci indexed P7 primers
5′-(SEQ ID NO: 2417)CAAGCAGAAGACGGCATACGAGAT[10 bp index 7]
GTCTCGTGGGCTCGG-3′(SEQ ID NO: 2418)
sgRNA indexed P7 primers
5′-(SEQ ID NO: 2419)CAAGCAGAAGACGGCATACGAGAT[10 bp index
7]GTGACTGGAGTTCAGACGTGTGCTCTTCCGATCT-3′(SEQ ID NO: 2420)
Multiplex PCR sgRNA enrichment indexed primer
5′-(SEQ ID NO: 2421)CGTGTGCTCTTCCGATCT[10 bp inner
index7]ATCTTGTGGAAAGGACGAAACACCG (SEQ ID NO: 2422)-3′
Bulk screen genomic DNA amplification primers
P5 primer
5′-(SEQ ID NO: 2423)AATGATACGGCGACCACCGAGATCTACAC[10 bp index 5]
ACACTCTTTCCCTACACGACGCTCTTCCGATCTATCTTGTGGAAAGGACGAA
ACACCG-3′-(SEQ ID NO: 2424)
P7 primer
5′-(SEQ ID NO: 2425)CAAGCAGAAGACGGCATACGAGAT[10 bp index 7]
GTGACTGGAGTTCAGACGTGTGCTCTTCCGATCTCCGACTCGGTGCCACTTT
TTCAA-3′ (SEQ ID NO: 2426)

### Oligo List Sequences

KD cloning oligos
Mouse sgFto KD plus strand oligo
(SEQ ID NO: 2427)
CACCGGAAGCGCGTCCAGACCGCGG
Mouse sgFto KD minus strand oligo
(SEQ ID NO: 2428)
AAACCCGCGGTCTGGACGCGCTTCC
Mouse sgNTC KD plus strand oligo
(SEQ ID NO: 2429)
CACCGGGGAACCACATGGAATTCGA
Mouse sgNTC KD plus strand oligo
(SEQ ID NO: 2430)
AAACTCGAATTCCATGTGGTTCCCC
Human sgIGFIR KD plus strand oligo
(SEQ ID NO: 2431)
CACCGCCAGCATTAACTCCGCTGAG
Human sgIGFIR KD minus strand oligo
(SEQ ID NO: 2432)
AAACCTCAGCGGAGTTAATGCTGGC
Human sgNTC KD plus strand oligo
(SEQ ID NO: 2433)
CACCGTTTTACCTTGTTCACATGGA
Human sgNTC KD minus strand oligo
(SEQ ID NO: 2434)
AAACTCCATGTGAACAAGGTAAAAC
qPCR primers
Hsa IGF1R qPCR Fwd
(SEQ ID NO: 2435)
TCGACATCCGCAACGACTATC
Hsa IGF1R qPCR Rev
(SEQ ID NO: 2436)
CCAGGGCGTAGTTGTAGAAGAG
Hsa GAPDH qPCR Fwd
(SEQ ID NO: 2437)
GGAGCGAGATCCCTCCAAAAT
Hsa GAPDH qPCR Rev
(SEQ ID NO: 2438)
GGCTGTTGTCATACTTCTCATGG
sgRNA library amplification
Opool amplification Fwd
(SEQ ID NO: 2439)
GGCTTTATATATCTTGTGGAAAGGACGAAACACCG
Opool amplification Rev
(SEQ ID NO: 2440)
AACTTGCTATGCTGTTTCCAGCATAGCTCTTAAAC
Bulk screen amplification primers
sgRNA lib sequencing P5 primer1
(SEQ ID NO: 2441)
AATGATACGGCGACCACCGAGATCTACACACGGTCATCAACACTCTTT
CCCTACACGACGCTCTTCCGATCTATCTTGTGGAAAGGACGAAACACCG
sgRNA lib sequencing P5 primer2
(SEQ ID NO: 2442)
AATGATACGGCGACCACCGAGATCTACACCGACCGAGAGACACTCTTT
CCCTACACGACGCTCTTCCGATCTATCTTGTGGAAAGGACGAAACACCG
sgRNA lib sequencing P7 primer1
(SEQ ID NO: 2443)
CAAGCAGAAGACGGCATACGAGATCTTCTGGTCCGTGACTGGAGTTCA
GACGTGTGCTCTTCCGATCTCCGACTCGGTGCCACTTTTTCAA
sgRNA lib sequencing P7 primer1
(SEQ ID NO: 2444)
CAAGCAGAAGACGGCATACGAGATTCCTCCATACGTGACTGGAGTTCA
GACGTGTGCTCTTCCGATCTCCGACTCGGTGCCACTTTTTCAA
Library preparation oligos
Ligation adaptor
(SEQ ID NO: 2445)
A*G*A*T*C*G*G*A*A*G*A*G*C*G*T*C*G*T*G*T*A*G*G*G*
A*A*A*G*A*G*T*G*T*/3ddC/
Universal P5 primer
(SEQ ID NO: 2446)
AATGATACGGCGACCACCGAGATCTACAC

1. A method for preparing a sequencing library comprising nucleic acids from a plurality of single nuclei or cells, the method comprising:
(a) providing a plurality of nuclei or cells in a first plurality of compartments, wherein each compartment comprises a subset of nuclei or cells;
(b) labeling and processing RNA molecules in the subsets of cells or nuclei obtained from the cells; wherein the labeling comprises adding to RNA molecules present in each subset of nuclei or cells a first compartment specific index sequence to result in indexed DNA nucleic acids present in indexed nuclei or cells, wherein the method comprises the steps of contacting the RNA molecules with a reverse transcriptase, a reverse transcription primer from a set of indexed reverse transcription primers that anneals to a polyA tail of RNA molecules, an indexed random hexamer primer from a set of indexed random hexamer primers, or a combination thereof;
(d) combining the indexed nuclei or cells to generate pooled indexed nuclei or cells;
(e) providing the plurality of nuclei or cells in a second plurality of compartments, wherein each compartment comprises a subset of nuclei or cells;
(f) labeling the indexed DNA nucleic acids in the subsets of cells or nuclei obtained from the cells; wherein the process of labeling comprises adding to the indexed DNA nucleic acids present in each subset of nuclei or cells a second compartment a specific indexed ligation primer from a set of indexed ligation primers to result in double indexed DNA molecules present in double indexed nuclei or cells, wherein the labeling comprises the steps of: contacting the indexed DNA molecules with a chemically modified DNA ligation primer/adaptor complex and a DNA ligase, and ligating the compartment specific DNA ligation primer to the indexed DNA molecules to generate double indexed single stranded DNA (ssDNA) molecules;
(g) combining the double indexed nuclei or cells to generate pooled double indexed nuclei or cells;
(h) providing the plurality of double indexed nuclei or cells in a third plurality of compartments, wherein each compartment comprises a subset of nuclei or cells;
(i) generating double indexed double stranded DNA (dsDNA) molecules by contacting the ssDNA molecules with a second-strand synthesis enzyme mix and synthesizing a second complementary DNA strand;
(j) performing bead-based purification of the double indexed dsDNA molecules;
(k) performing tagmentation on the purified dsDNA molecules;
(l) labeling the double indexed DNA nucleic acids in the subsets of cells or nuclei obtained from the cells; wherein the process of labeling comprises adding to the double indexed DNA molecules present in each subset of nuclei or cells a third compartment specific index sequence to result in triple indexed DNA nucleic acids present in triple indexed nuclei or cells, wherein the labeling comprises contacting the double indexed DNA molecules with a compartment specific indexed PCR primer (referred to as P7), a universal PCR primer (referred to as P5), and a polymerase, and performing PCR amplification of the double indexed DNA molecules to generate triple indexed DNA molecules.

2. The method of claim 1, wherein the reverse transcriptase comprises Maxima Reverse Transcriptase.

3. The method of claim 1, wherein the set of oligo-dT primers comprises a set of primers comprising sequences selected from the sequences as set forth in Table 3.

4. The method of claim 1, wherein the set of indexed random hexamer primers comprises a set of primers comprising sequences selected from the sequences as set forth in Table 4.

5. The method of claim 1 wherein the set of indexed ligation primers comprises a set of primers comprising sequences selected from the sequences as set forth in Table 5.

6. The method of claim 1, wherein the adaptor comprises SEQ ID NO: 2445.

7. The method of claim 1, wherein the ligation is performed using T4 ligase.

8. The method of claim 1, wherein the method further includes one or more steps selected from the group consisting of:
a) nuclei extraction;
b) nuclei fixation; and
c) nuclei storage
which are performed prior to step a) of claim 1.

9. The method of claim 8, wherein the step of nuclei extraction is performed using a buffer comprising 1% DEPC and 0.1% SUPREase.

10. The method of claim 8, wherein the step of nuclei fixation is performed by contacting extracted nuclei with 0.1% formaldehyde for 10 minutes.

11. The method of claim 8, wherein the method of nuclei storage comprises contacting nuclei with 10% DMSO and then freezing.

12. The method of claim 1, wherein the compartment comprises a well or a droplet.

13. The method of claim 1, wherein compartments of the first plurality of compartments comprise from 50 to 20,000 nuclei or cells.

14. The method of claim 1, wherein compartments of the second plurality of compartments comprise from 50 to 20,000 nuclei or cells.

15. The method of claim 1, wherein compartments of the third plurality of compartments comprise from 50 to 20,000 nuclei or cells.

16. The method of claim 1, further comprising pooling and collecting the triple indexed nucleic acids, thereby producing a sequencing library from the plurality of nuclei or cells.

17. A kit for use in preparing a sequencing library, the kit comprising at least one set of indexed oligonucleotides for use in a method of any one of claims 1-16.

18. The kit of claim 17 comprising a set of 192 indexed primers of claim 3.

19. The kit of claim 17 comprising a set of 192 indexed primers of claim 4.

20. The kit of claim 17 comprising a set of 382 indexed primers of claim 5.

21. A method for preparing a sequencing library for determination of transcriptome kinetics, the method comprising:
a) providing a plurality of cells comprising an expression construct for expression of a catalytically dead Cas9 protein;
b) contacting the cells of a) with an sgRNA library;
c) culturing the cells of b) in the presence of a selection agent for selection of cells containing an sgRNA library molecule;
d) splitting the cells of c) into
i) a first population of cells for generation of a first “bulk” sequencing library; and
ii) a second population of cells for subsequent culturing;
e) culturing the cells of d) ii) in the presence of at least one of:
i) an inducing agent to induce expression of the catalytically dead Cas9 protein;
ii) at least one agent for perturbing cells; and
iii) at least one agent for sensitizing cells to perturbations;
f) culturing at least a portion of the cells of e) in the presence of an RNA metabolic label to label nascent transcripts;
g) splitting the cells of f) into
i) a first population of cells for generation of a second “bulk” sequencing library; and
ii) a second population of cells for subsequent chemical conversion and indexing;
h) chemically converting the RNA metabolic label in the RNA molecules from the cells of g) ii);
i) generating one or more sequencing library from the DNA molecules, RNA molecules, or a combination thereof, from the cells of step d) i), step g) i) and step h).

22. The method of claim 21, wherein the catalytically dead Cas9 protein is under the control of an inducible promoter

23. The method of claim 22, wherein the promoter is inducible by contacting the cell with doxycycline (Dox).

24. The method of claim 23, wherein the inducing agent of step e) i) comprises doxycycline.

25. The method of any one of claims 21-24, wherein the catalytically dead Cas9 protein comprises Dox-inducible dCas9-KRAB-MeCP2.

26. The method of claim 21, wherein the method of step e) iii) comprises culturing the cells in L-glutamine+, sodium pyruvate−, high glucose DMEM.

27. The method of claim 21, wherein the cell culture medium further comprises doxycycline.

28. The method of claim 21, wherein the sgRNA library comprises a library of plasmids encoding at least 500 different sgRNA molecules.

29. The method of claim 21, wherein the RNA metabolic label comprises 4-thiouridine (4sU).

30. The method of claim 21, wherein the method of step i) includes the steps of:
a) providing a plurality of nuclei or cells in a first plurality of compartments, wherein each compartment comprises a subset of nuclei or cells;
b) labeling and processing RNA molecules obtained from the cells; wherein the labeling comprises adding to RNA molecules present in each subset of nuclei or cells a first compartment specific index sequence to result in indexed DNA nucleic acids present in indexed nuclei or cells, wherein the method comprises the steps of contacting the RNA molecules with a reverse transcriptase, a reverse transcription primer from a set of indexed reverse transcription primers that anneals to a polyA tail of RNA molecules, an indexed random hexamer primer from a set of indexed random hexamer primers, or a combination thereof;
c) combining the indexed nuclei or cells to generate pooled indexed nuclei or cells;
d) providing the plurality of nuclei or cells in a second plurality of compartments, wherein each compartment comprises a subset of nuclei or cells;
e) labeling the indexed DNA nucleic acids in the subsets of cells or nuclei obtained from the cells; wherein the process of labeling comprises adding to the indexed DNA nucleic acids present in each subset of nuclei or cells a second compartment specific indexed ligation primer sequence to result in double indexed DNA molecules present in double indexed nuclei or cells, wherein the labeling comprises the steps of: contacting the indexed DNA molecules with a chemically modified DNA ligation primer/adaptor complex and a DNA ligase, and ligating the compartment specific DNA ligation primer to the indexed DNA molecules to generate double indexed single stranded DNA (ssDNA) molecules;
f) combining the double indexed nuclei or cells to generate pooled double indexed nuclei or cells;
g) providing the plurality of double indexed nuclei or cells in a third plurality of compartments, wherein each compartment comprises a subset of nuclei or cells;
h) generating double indexed double stranded DNA (dsDNA) molecules by contacting the ssDNA molecules with a second-strand synthesis enzyme mix and synthesizing a second complementary DNA strand;
i) performing bead-based purification of the double indexed dsDNA molecules;
j) performing tagmentation on the purified dsDNA molecules; and
k) labeling the double indexed DNA nucleic acids in the subsets of cells or nuclei obtained from the cells; wherein the process of labeling comprises adding to the double indexed DNA molecules present in each subset of nuclei or cells a third compartment specific index sequence to result in triple indexed DNA nucleic acids present in triple indexed nuclei or cells, wherein the labeling comprises contacting the double indexed DNA molecules with a compartment specific indexed PCR primer (referred to as P7), a universal PCR primer (referred to as P5), and a polymerase, and performing PCR amplification of the double indexed DNA molecules to generate triple indexed DNA molecules.

31. The method of claim 30, wherein the set of oligo-dT primers comprises a set of primers comprising sequences selected from the sequences as set forth in Table 3.

32. The method of claim 30, wherein the set of indexed random hexamer primers comprises a set of primers comprising sequences selected from the sequences as set forth in Table 4.

33. The method of claim 30, wherein the set of indexed ligation primers comprises a set of primers comprising sequences selected from the sequences as set forth in Table 5.

34. The method of claim 30, wherein the adaptor comprises SEQ ID NO: 2445.

35. The method of claim 30, wherein the ligation is performed using T4 ligase.

36. The method of claim 30, wherein the method further includes one or more steps selected from the group consisting of:
a) nuclei extraction;
b) nuclei fixation; and
c) nuclei storage
which are performed prior to step a) of claim 2.

37. The method of claim 36, wherein the step of nuclei extraction is performed using a buffer comprising 1% DEPC and 0.1% SUPREase.

38. The method of claim 36, wherein the step of nuclei fixation is performed by contacting extracted nuclei with 0.1% formaldehyde for 10 minutes.

39. The method of claim 36, wherein the method of nuclei storage comprises contacting nuclei with 10% DMSO and then freezing.

40. The method of claim 30, wherein the compartment comprises a well or a droplet.

41. The method of claim 30, wherein compartments of the first plurality of compartments comprise from 50 to 20,000 nuclei or cells.

42. The method of claim 30, wherein compartments of the second plurality of compartments comprise from 50 to 20,000 nuclei or cells.

43. The method of claim 30, wherein compartments of the third plurality of compartments comprise from 50 to 20,000 nuclei or cells.

44. The method of claim 30, further comprising pooling and collecting the triple indexed nucleic acids, thereby producing a sequencing library from the plurality of nuclei or cells.

45. A kit for use in preparing a sequencing library of any one of claims 21-44.

46. A method for preparing a sequencing library comprising nucleic acids from a plurality of single nuclei or cells, the method comprising:
(a) contacting a plurality of nuclei or cells with 5-Ethynyl-2-deoxyuridine (EdU);
(b) contacting the plurality of nuclei or cells with reagents for Click chemistry ligation to an azide-containing fluorophore;
(c) sorting the nuclei in a first plurality of compartments, wherein each compartment comprises a subset of nuclei or cells, wherein the sorting enriches for EdU+ nuclei or cells;
(d) labeling and processing RNA molecules in the subsets of cells or nuclei obtained from the cells; wherein the labeling comprises adding to RNA molecules present in each subset of nuclei or cells a first compartment-specific index sequence to result in indexed DNA nucleic acids present in indexed nuclei or cells, wherein the method comprises the steps of contacting the RNA molecules with a reverse transcriptase, an Oligo-dT primer that anneals to a poly A tail of RNA molecules and an indexed random primer;
(e) combining the indexed nuclei or cells to generate pooled indexed nuclei or cells;
(f) sorting the plurality of nuclei or cells into a second plurality of compartments, wherein each compartment comprises a subset of nuclei or cells;
(g) generating double stranded DNA (dsDNA) molecules by contacting the ssDNA molecules with a second-strand synthesis enzyme mix and synthesizing a second complementary DNA strand;
(h) performing tagmentation on the dsDNA molecules; and
(i) labeling the DNA nucleic acids in the subsets of cells or nuclei obtained from the cells; wherein the process of labeling comprises adding to the indexed DNA molecules present in each subset of nuclei or cells an additional compartment specific-index sequence to result in multi-indexed DNA nucleic acids present in multi-indexed nuclei or cells, wherein the labeling comprises contacting the indexed DNA molecules with a compartment specific indexed PCR primer (referred to as P7), a universal PCR primer (referred to as P5), and a polymerase, and performing PCR amplification of the double indexed DNA molecules to generate multi-indexed DNA molecules.

47. The method of claim 46, wherein the sorting in steps (c) and (f) is performed using FACS sorting gated for fluorophore and DAPI positive nuclei.

48. The method of claim 46, wherein the oligo-dT primer comprises a 5′ end as set forth in SEQ ID NO:2447 and a 3′ end as set forth in SEQ ID NO:2448 flanking a barcode sequence, wherein the barcode sequence comprises any nucleotide sequence from 5 to 20 nucleotides in length.

48. The method of claim 46, wherein compartments of the first plurality of compartments comprise from about 250 to 500 nuclei or cells.

49. The method of claim 46, wherein compartments of the second plurality of compartments comprise about 25 nuclei or cells.

50. The method of claim 46, further comprising pooling and collecting the multi-indexed nucleic acids, thereby producing a sequencing library from the plurality of nuclei or cells.

51. A method for preparing a sequencing library comprising nucleic acids from a plurality of single nuclei or cells, the method comprising:
(a) contacting a plurality of nuclei or cells with 5-Ethynyl-2-deoxyuridine (EdU);
(b) contacting the plurality of nuclei or cells with reagents for Click chemistry ligation to an azide-containing fluorophore;
(c) permeabilizing the nuclei or cells;
(d) sorting the nuclei in a first plurality of compartments, wherein each compartment comprises a subset of nuclei or cells, wherein the sorting enriches for EdU+ nuclei or cells;
(e) performing tagmentation on the nucleic acid molecules using a barcoded transposase;
(f) combining the indexed nuclei or cells to generate pooled indexed nuclei or cells;
(g) sorting the plurality of nuclei or cells into a second plurality of compartments, wherein each compartment comprises a subset of nuclei or cells; and
(h) labeling the DNA nucleic acids in the subsets of cells or nuclei obtained from the cells; wherein the process of labeling comprises adding to the indexed DNA molecules present in each subset of nuclei or cells an additional compartment specific-index sequence to result in multi-indexed DNA nucleic acids present in multi-indexed nuclei or cells, wherein the labeling comprises contacting the indexed DNA molecules with a compartment specific indexed PCR primer (referred to as P7), a universal PCR primer (referred to as P5), and a polymerase, and performing PCR amplification of the double indexed DNA molecules to generate multi-indexed DNA molecules.

52. The method of claim 51, wherein the sorting in steps (d) and (g) is performed using FACS sorting gated for fluorophore and DAPI positive nuclei.

53. The method of claim 51, wherein compartments of the first plurality of compartments comprise from about 250 to 500 nuclei or cells.

54. The method of claim 51, wherein compartments of the second plurality of compartments comprise about 25 nuclei or cells.

55. The method of claim 46, further comprising pooling and collecting the multi-indexed nucleic acids, thereby producing a sequencing library from the plurality of nuclei or cells.

The application's sequence listing, which the Patent Office published only in electronic form, follows.

SEQUENCE LISTING (2451 sequences)

SEQ ID NO: 1 - DNA, 51 bp, synthetic construct
  source 1..51: mol_type = other DNA
acgacgctcttccgatctnnnnnnnnttctcgcatgttttttttttttttt

SEQ ID NO: 2 - DNA, 51 bp, synthetic construct
  source 1..51: mol_type = other DNA
acgacgctcttccgatctnnnnnnnntcctaccagtttttttttttttttt

SEQ ID NO: 3 - DNA, 51 bp, synthetic construct
  source 1..51: mol_type = other DNA
acgacgctcttccgatctnnnnnnnngcgttggagcttttttttttttttt

SEQ ID NO: 4 - DNA, 51 bp, synthetic construct
  source 1..51: mol_type = other DNA
acgacgctcttccgatctnnnnnnnngatcttacgcttttttttttttttt

SEQ ID NO: 5 - DNA, 51 bp, synthetic construct
  source 1..51: mol_type = other DNA
acgacgctcttccgatctnnnnnnnnctgatggtcattttttttttttttt

SEQ ID NO: 6 - DNA, 51 bp, synthetic construct
  source 1..51: mol_type = other DNA
acgacgctcttccgatctnnnnnnnnccgagaatccttttttttttttttt

SEQ ID NO: 7 - DNA, 51 bp, synthetic construct
  source 1..51: mol_type = other DNA
acgacgctcttccgatctnnnnnnnngccgcaacgattttttttttttttt

SEQ ID NO: 8 - DNA, 51 bp, synthetic construct
  source 1..51: mol_type = other DNA
acgacgctcttccgatctnnnnnnnntgagtctggcttttttttttttttt

SEQ ID NO: 9 - DNA, 51 bp, synthetic construct
  source 1..51: mol_type = other DNA
acgacgctcttccgatctnnnnnnnntgcggacctattttttttttttttt

SEQ ID NO: 10 - DNA, 51 bp, synthetic construct
  source 1..51: mol_type = other DNA
acgacgctcttccgatctnnnnnnnnacctcgttgattttttttttttttt

SEQ ID NO: 11 - DNA, 51 bp, synthetic construct
  source 1..51: mol_type = other DNA
acgacgctcttccgatctnnnnnnnnacggaggcggttttttttttttttt

SEQ ID NO: 12 - DNA, 51 bp, synthetic construct
  source 1..51: mol_type = other DNA
acgacgctcttccgatctnnnnnnnntagatctactttttttttttttttt

SEQ ID NO: 13 - DNA, 51 bp, synthetic construct
  source 1..51: mol_type = other DNA
acgacgctcttccgatctnnnnnnnnaattaagactttttttttttttttt

SEQ ID NO: 14 - DNA, 51 bp, synthetic construct
  source 1..51: mol_type = other DNA
acgacgctcttccgatctnnnnnnnnccattgcgttttttttttttttttt

SEQ ID NO: 15 - DNA, 51 bp, synthetic construct
  source 1..51: mol_type = other DNA
acgacgctcttccgatctnnnnnnnnttattcattcttttttttttttttt

SEQ ID NO: 16 - DNA, 51 bp, synthetic construct
  source 1..51: mol_type = other DNA
acgacgctcttccgatctnnnnnnnnatctccgaacttttttttttttttt

SEQ ID NO: 17 - DNA, 51 bp, synthetic construct
  source 1..51: mol_type = other DNA
acgacgctcttccgatctnnnnnnnnttgacttcagttttttttttttttt

SEQ ID NO: 18 - DNA, 51 bp, synthetic construct
  source 1..51: mol_type = other DNA
acgacgctcttccgatctnnnnnnnnggcaggtattttttttttttttttt

SEQ ID NO: 19 - DNA, 51 bp, synthetic construct
  source 1..51: mol_type = other DNA
acgacgctcttccgatctnnnnnnnnagagctataattttttttttttttt

SEQ ID NO: 20 - DNA, 51 bp, synthetic construct
  source 1..51: mol_type = other DNA
acgacgctcttccgatctnnnnnnnnctaagagaagttttttttttttttt

SEQ ID NO: 21 - DNA, 51 bp, synthetic construct
  source 1..51: mol_type = other DNA
acgacgctcttccgatctnnnnnnnnactcaataggttttttttttttttt

SEQ ID NO: 22 - DNA, 51 bp, synthetic construct
  source 1..51: mol_type = other DNA
acgacgctcttccgatctnnnnnnnncttgcgccgcttttttttttttttt

SEQ ID NO: 23 - DNA, 51 bp, synthetic construct
  source 1..51: mol_type = other DNA
acgacgctcttccgatctnnnnnnnnaatcgtagcgttttttttttttttt

SEQ ID NO: 24 - DNA, 51 bp, synthetic construct
  source 1..51: mol_type = other DNA
acgacgctcttccgatctnnnnnnnnggtactgcctttttttttttttttt

SEQ ID NO: 25 - DNA, 51 bp, synthetic construct
  source 1..51: mol_type = other DNA
acgacgctcttccgatctnnnnnnnntagaattaacttttttttttttttt

SEQ ID NO: 26 - DNA, 51 bp, synthetic construct
  source 1..51: mol_type = other DNA
acgacgctcttccgatctnnnnnnnngccattctccttttttttttttttt

SEQ ID NO: 27 - DNA, 51 bp, synthetic construct
  source 1..51: mol_type = other DNA
acgacgctcttccgatctnnnnnnnntgccggcagattttttttttttttt

SEQ ID NO: 28 - DNA, 51 bp, synthetic construct
  source 1..51: mol_type = other DNA
acgacgctcttccgatctnnnnnnnnttaccgaggcttttttttttttttt

SEQ ID NO: 29 - DNA, 51 bp, synthetic construct
  source 1..51: mol_type = other DNA
acgacgctcttccgatctnnnnnnnnatcatattagttttttttttttttt

SEQ ID NO: 30 - DNA, 51 bp, synthetic construct
  source 1..51: mol_type = other DNA
acgacgctcttccgatctnnnnnnnntggtcagccattttttttttttttt

SEQ ID NO: 31 - DNA, 51 bp, synthetic construct
  source 1..51: mol_type = other DNA
acgacgctcttccgatctnnnnnnnnactatgcaatttttttttttttttt

SEQ ID NO: 32 - DNA, 51 bp, synthetic construct
  source 1..51: mol_type = other DNA
acgacgctcttccgatctnnnnnnnncgacgcgactttttttttttttttt

SEQ ID NO: 33 - DNA, 51 bp, synthetic construct
  source 1..51: mol_type = other DNA
acgacgctcttccgatctnnnnnnnngatacggaacttttttttttttttt

SEQ ID NO: 34 - DNA, 51 bp, synthetic construct
  source 1..51: mol_type = other DNA
acgacgctcttccgatctnnnnnnnnttatccggatttttttttttttttt

SEQ ID NO: 35 - DNA, 51 bp, synthetic construct
  source 1..51: mol_type = other DNA
acgacgctcttccgatctnnnnnnnntagagtaatattttttttttttttt

SEQ ID NO: 36 - DNA, 51 bp, synthetic construct
  source 1..51: mol_type = other DNA
acgacgctcttccgatctnnnnnnnngcaggtccgtttttttttttttttt

SEQ ID NO: 37 - DNA, 51 bp, synthetic construct
  source 1..51: mol_type = other DNA
acgacgctcttccgatctnnnnnnnntcggccttacttttttttttttttt

SEQ ID NO: 38 - DNA, 51 bp, synthetic construct
  source 1..51: mol_type = other DNA
acgacgctcttccgatctnnnnnnnnagaacgtctcttttttttttttttt

SEQ ID NO: 39 - DNA, 51 bp, synthetic construct
  source 1..51: mol_type = other DNA
acgacgctcttccgatctnnnnnnnnccagttccaattttttttttttttt

SEQ ID NO: 40 - DNA, 51 bp, synthetic construct
  source 1..51: mol_type = other DNA
acgacgctcttccgatctnnnnnnnnggcgttaaggttttttttttttttt

SEQ ID NO: 41 - DNA, 51 bp, synthetic construct
  source 1..51: mol_type = other DNA
acgacgctcttccgatctnnnnnnnnacttaaccttttttttttttttttt

SEQ ID NO: 42 - DNA, 51 bp, synthetic construct
  source 1..51: mol_type = other DNA
acgacgctcttccgatctnnnnnnnncaaccgctaattttttttttttttt

SEQ ID NO: 43 - DNA, 51 bp, synthetic construct
  source 1..51: mol_type = other DNA
acgacgctcttccgatctnnnnnnnngaccttgatattttttttttttttt

SEQ ID NO: 44 - DNA, 51 bp, synthetic construct
  source 1..51: mol_type = other DNA
acgacgctcttccgatctnnnnnnnntctgataccattttttttttttttt

SEQ ID NO: 45 - DNA, 51 bp, synthetic construct
  source 1..51: mol_type = other DNA
acgacgctcttccgatctnnnnnnnngaagatcgagttttttttttttttt

SEQ ID NO: 46 - DNA, 51 bp, synthetic construct
  source 1..51: mol_type = other DNA
acgacgctcttccgatctnnnnnnnnaggagcggtattttttttttttttt

SEQ ID NO: 47 - DNA, 51 bp, synthetic construct
  source 1..51: mol_type = other DNA
acgacgctcttccgatctnnnnnnnnaagaagctagttttttttttttttt

SEQ ID NO: 48 - DNA, 51 bp, synthetic construct
  source 1..51: mol_type = other DNA
acgacgctcttccgatctnnnnnnnntccggcctcgttttttttttttttt

SEQ ID NO: 49 - DNA, 51 bp, synthetic construct
  source 1..51: mol_type = other DNA
acgacgctcttccgatctnnnnnnnnagagaaggttttttttttttttttt

SEQ ID NO: 50 - DNA, 51 bp, synthetic construct
  source 1..51: mol_type = other DNA
acgacgctcttccgatctnnnnnnnncatactccgattttttttttttttt

SEQ ID NO: 51 - DNA, 51 bp, synthetic construct
  source 1..51: mol_type = other DNA
acgacgctcttccgatctnnnnnnnngctaacttgcttttttttttttttt

SEQ ID NO: 52 - DNA, 51 bp, synthetic construct
  source 1..51: mol_type = other DNA
acgacgctcttccgatctnnnnnnnnaatccatcttttttttttttttttt

SEQ ID NO: 53 - DNA, 51 bp, synthetic construct
  source 1..51: mol_type = other DNA
acgacgctcttccgatctnnnnnnnnggctgagctcttttttttttttttt

SEQ ID NO: 54 - DNA, 51 bp, synthetic construct
  source 1..51: mol_type = other DNA
acgacgctcttccgatctnnnnnnnnccgattcctgttttttttttttttt

SEQ ID NO: 55 - DNA, 51 bp, synthetic construct
  source 1..51: mol_type = other DNA
acgacgctcttccgatctnnnnnnnnaccgccaaccttttttttttttttt

SEQ ID NO: 56 - DNA, 51 bp, synthetic construct
  source 1..51: mol_type = other DNA
acgacgctcttccgatctnnnnnnnntggcctgaagttttttttttttttt

SEQ ID NO: 57 - DNA, 51 bp, synthetic construct
  source 1..51: mol_type = other DNA
acgacgctcttccgatctnnnnnnnnaacctcattcttttttttttttttt

SEQ ID NO: 58 - DNA, 51 bp, synthetic construct
  source 1..51: mol_type = other DNA
acgacgctcttccgatctnnnnnnnnataaggagcattttttttttttttt

SEQ ID NO: 59 - DNA, 51 bp, synthetic construct
  source 1..51: mol_type = other DNA
acgacgctcttccgatctnnnnnnnncgaacgccggttttttttttttttt

SEQ ID NO: 60 - DNA, 51 bp, synthetic construct
  source 1..51: mol_type = other DNA
acgacgctcttccgatctnnnnnnnnggtatgcttgttttttttttttttt

SEQ ID NO: 61 - DNA, 51 bp, synthetic construct
  source 1..51: mol_type = other DNA
acgacgctcttccgatctnnnnnnnnaacctgcgtattttttttttttttt

SEQ ID NO: 62 - DNA, 51 bp, synthetic construct
  source 1..51: mol_type = other DNA
acgacgctcttccgatctnnnnnnnnggcagacgccttttttttttttttt

SEQ ID NO: 63 - DNA, 51 bp, synthetic construct
  source 1..51: mol_type = other DNA
acgacgctcttccgatctnnnnnnnntagccgtcatttttttttttttttt

SEQ ID NO: 64 - DNA, 51 bp, synthetic construct
  source 1..51: mol_type = other DNA
acgacgctcttccgatctnnnnnnnncctggaagagttttttttttttttt

SEQ ID NO: 65 - DNA, 51 bp, synthetic construct
  source 1..51: mol_type = other DNA
acgacgctcttccgatctnnnnnnnnggaggttctattttttttttttttt

SEQ ID NO: 66 - DNA, 51 bp, synthetic construct
  source 1..51: mol_type = other DNA
acgacgctcttccgatctnnnnnnnnctagtagtctttttttttttttttt

SEQ ID NO: 67 - DNA, 51 bp, synthetic construct
  source 1..51: mol_type = other DNA
acgacgctcttccgatctnnnnnnnnatcatcaacgttttttttttttttt

SEQ ID NO: 68 - DNA, 51 bp, synthetic construct
  source 1..51: mol_type = other DNA
acgacgctcttccgatctnnnnnnnnacgcgagattttttttttttttttt

SEQ ID NO: 69 - DNA, 51 bp, synthetic construct
  source 1..51: mol_type = other DNA
acgacgctcttccgatctnnnnnnnngaagaggcatttttttttttttttt

SEQ ID NO: 70 - DNA, 51 bp, synthetic construct
  source 1..51: mol_type = other DNA
acgacgctcttccgatctnnnnnnnnggtatccgccttttttttttttttt

SEQ ID NO: 71 - DNA, 51 bp, synthetic construct
  source 1..51: mol_type = other DNA
acgacgctcttccgatctnnnnnnnnaactaggcgcttttttttttttttt

SEQ ID NO: 72 - DNA, 51 bp, synthetic construct
  source 1..51: mol_type = other DNA
acgacgctcttccgatctnnnnnnnntcgctaagcattttttttttttttt

SEQ ID NO: 73 - DNA, 51 bp, synthetic construct
  source 1..51: mol_type = other DNA
acgacgctcttccgatctnnnnnnnntatatactaattttttttttttttt

SEQ ID NO: 74 - DNA, 51 bp, synthetic construct
  source 1..51: mol_type = other DNA
acgacgctcttccgatctnnnnnnnnacttgctagattttttttttttttt

SEQ ID NO: 75 - DNA, 51 bp, synthetic construct
  source 1..51: mol_type = other DNA
acgacgctcttccgatctnnnnnnnnaaccattggattttttttttttttt

SEQ ID NO: 76 - DNA, 51 bp, synthetic construct
  source 1..51: mol_type = other DNA
acgacgctcttccgatctnnnnnnnntcgcggttggttttttttttttttt

SEQ ID NO: 77 - DNA, 51 bp, synthetic construct
  source 1..51: mol_type = other DNA
acgacgctcttccgatctnnnnnnnncgtagttaccttttttttttttttt

SEQ ID NO: 78 - DNA, 51 bp, synthetic construct
  source 1..51: mol_type = other DNA
acgacgctcttccgatctnnnnnnnntccaatcatcttttttttttttttt

SEQ ID NO: 79 - DNA, 51 bp, synthetic construct
  source 1..51: mol_type = other DNA
acgacgctcttccgatctnnnnnnnnaatcgataatttttttttttttttt

SEQ ID NO: 80 - DNA, 51 bp, synthetic construct
  source 1..51: mol_type = other DNA
acgacgctcttccgatctnnnnnnnnccattatctattttttttttttttt

SEQ ID NO: 81 - DNA, 51 bp, synthetic construct
  source 1..51: mol_type = other DNA
acgacgctcttccgatctnnnnnnnntcaacgtaagttttttttttttttt

SEQ ID NO: 82 - DNA, 51 bp, synthetic construct
  source 1..51: mol_type = other DNA
acgacgctcttccgatctnnnnnnnntctaatagtattttttttttttttt

SEQ ID NO: 83 - DNA, 51 bp, synthetic construct
  source 1..51: mol_type = other DNA
acgacgctcttccgatctnnnnnnnnaaccgctggtttttttttttttttt

SEQ ID NO: 84 - DNA, 51 bp, synthetic construct
  source 1..51: mol_type = other DNA
acgacgctcttccgatctnnnnnnnngatcgcttctttttttttttttttt

SEQ ID NO: 85 - DNA, 51 bp, synthetic construct
  source 1..51: mol_type = other DNA
acgacgctcttccgatctnnnnnnnnctaactagatttttttttttttttt

SEQ ID NO: 86 - DNA, 51 bp, synthetic construct
  source 1..51: mol_type = other DNA
acgacgctcttccgatctnnnnnnnngctggaacttttttttttttttttt

SEQ ID NO: 87 - DNA, 51 bp, synthetic construct
  source 1..51: mol_type = other DNA
acgacgctcttccgatctnnnnnnnnaggttagttcttttttttttttttt

SEQ ID NO: 88 - DNA, 51 bp, synthetic construct
  source 1..51: mol_type = other DNA
acgacgctcttccgatctnnnnnnnncattcgacggttttttttttttttt

SEQ ID NO: 89 - DNA, 51 bp, synthetic construct
  source 1..51: mol_type = other DNA
acgacgctcttccgatctnnnnnnnncattcaatcattttttttttttttt

SEQ ID NO: 90 - DNA, 51 bp, synthetic construct
  source 1..51: mol_type = other DNA
acgacgctcttccgatctnnnnnnnncggattagaattttttttttttttt

SEQ ID NO: 91 - DNA, 51 bp, synthetic construct
  source 1..51: mol_type = other DNA
acgacgctcttccgatctnnnnnnnnatcggctatcttttttttttttttt

SEQ ID NO: 92 - DNA, 51 bp, synthetic construct
  source 1..51: mol_type = other DNA
acgacgctcttccgatctnnnnnnnnccttgatcgtttttttttttttttt

SEQ ID NO: 93 - DNA, 51 bp, synthetic construct
  source 1..51: mol_type = other DNA
acgacgctcttccgatctnnnnnnnnacgaagtcaattttttttttttttt

SEQ ID NO: 94 - DNA, 51 bp, synthetic construct
  source 1..51: mol_type = other DNA
acgacgctcttccgatctnnnnnnnnttacctcgacttttttttttttttt

SEQ ID NO: 95 - DNA, 51 bp, synthetic construct
  source 1..51: mol_type = other DNA
acgacgctcttccgatctnnnnnnnnggaggatagcttttttttttttttt

SEQ ID NO: 96 - DNA, 51 bp, synthetic construct
  source 1..51: mol_type = other DNA
acgacgctcttccgatctnnnnnnnnggctctctatttttttttttttttt

SEQ ID NO: 97 - DNA, 51 bp, synthetic construct
  source 1..51: mol_type = other DNA
acgacgctcttccgatctnnnnnnnnggttggcgacttttttttttttttt

SEQ ID NO: 98 - DNA, 51 bp, synthetic construct
  source 1..51: mol_type = other DNA
acgacgctcttccgatctnnnnnnnngtagatcgttttttttttttttttt

SEQ ID NO: 99 - DNA, 51 bp, synthetic construct
  source 1..51: mol_type = other DNA
acgacgctcttccgatctnnnnnnnngaggtcggttttttttttttttttt

SEQ ID NO: 100 - DNA, 51 bp, synthetic construct
  source 1..51: mol_type = other DNA
acgacgctcttccgatctnnnnnnnnacgcgctcctttttttttttttttt

SEQ ID NO: 101 - DNA, 51 bp, synthetic construct
  source 1..51: mol_type = other DNA
acgacgctcttccgatctnnnnnnnnagcgtcgtatttttttttttttttt

SEQ ID NO: 102 - DNA, 51 bp, synthetic construct
  source 1..51: mol_type = other DNA
acgacgctcttccgatctnnnnnnnngaccaatgcgttttttttttttttt

SEQ ID NO: 103 - DNA, 51 bp, synthetic construct
  source 1..51: mol_type = other DNA
acgacgctcttccgatctnnnnnnnnaggtagagctttttttttttttttt

SEQ ID NO: 104 - DNA, 51 bp, synthetic construct
  source 1..51: mol_type = other DNA
acgacgctcttccgatctnnnnnnnnttgcagcattttttttttttttttt

SEQ ID NO: 105 - DNA, 51 bp, synthetic construct
  source 1..51: mol_type = other DNA
acgacgctcttccgatctnnnnnnnngtagatgcgcttttttttttttttt

SEQ ID NO: 106 - DNA, 51 bp, synthetic construct
  source 1..51: mol_type = other DNA
acgacgctcttccgatctnnnnnnnntcggtaaggcttttttttttttttt

SEQ ID NO: 107 - DNA, 51 bp, synthetic construct
  source 1..51: mol_type = other DNA
acgacgctcttccgatctnnnnnnnnacgatagactttttttttttttttt

SEQ ID NO: 108 - DNA, 51 bp, synthetic construct
  source 1..51: mol_type = other DNA
acgacgctcttccgatctnnnnnnnngcggccaatcttttttttttttttt

SEQ ID NO: 109 - DNA, 51 bp, synthetic construct
  source 1..51: mol_type = other DNA
acgacgctcttccgatctnnnnnnnnacgcgtatcgttttttttttttttt

SEQ ID NO: 110 - DNA, 51 bp, synthetic construct
  source 1..51: mol_type = other DNA
acgacgctcttccgatctnnnnnnnncatgactcaattttttttttttttt

SEQ ID NO: 111 - DNA, 51 bp, synthetic construct
  source 1..51: mol_type = other DNA
acgacgctcttccgatctnnnnnnnnactccgccaattttttttttttttt

SEQ ID NO: 112 - DNA, 51 bp, synthetic construct
  source 1..51: mol_type = other DNA
acgacgctcttccgatctnnnnnnnnacgttgaatgttttttttttttttt

SEQ ID NO: 113 - DNA, 51 bp, synthetic construct
  source 1..51: mol_type = other DNA
acgacgctcttccgatctnnnnnnnnaggactgcgattttttttttttttt

SEQ ID NO: 114 - DNA, 51 bp, synthetic construct
  source 1..51: mol_type = other DNA
acgacgctcttccgatctnnnnnnnnactcgacgccttttttttttttttt

SEQ ID NO: 115 - DNA, 51 bp, synthetic construct
  source 1..51: mol_type = other DNA
acgacgctcttccgatctnnnnnnnncctatcataattttttttttttttt

SEQ ID NO: 116 - DNA, 51 bp, synthetic construct
  source 1..51: mol_type = other DNA
acgacgctcttccgatctnnnnnnnnaatccggtcattttttttttttttt

SEQ ID NO: 117 - DNA, 51 bp, synthetic construct
  source 1..51: mol_type = other DNA
acgacgctcttccgatctnnnnnnnnctattaaccattttttttttttttt

SEQ ID NO: 118 - DNA, 51 bp, synthetic construct
  source 1..51: mol_type = other DNA
acgacgctcttccgatctnnnnnnnngatccagcgtttttttttttttttt

SEQ ID NO: 119 - DNA, 51 bp, synthetic construct
  source 1..51: mol_type = other DNA
acgacgctcttccgatctnnnnnnnntgagactctattttttttttttttt

SEQ ID NO: 120 - DNA, 51 bp, synthetic construct
  source 1..51: mol_type = other DNA
acgacgctcttccgatctnnnnnnnngcggagtcgattttttttttttttt

SEQ ID NO: 121 - DNA, 51 bp, synthetic construct
  source 1..51: mol_type = other DNA
acgacgctcttccgatctnnnnnnnngaggcttattttttttttttttttt

SEQ ID NO: 122 - DNA, 51 bp, synthetic construct
  source 1..51: mol_type = other DNA
acgacgctcttccgatctnnnnnnnncgccaggcatttttttttttttttt

SEQ ID NO: 123 - DNA, 51 bp, synthetic construct
  source 1..51: mol_type = other DNA
acgacgctcttccgatctnnnnnnnnaataccagttttttttttttttttt

SEQ ID NO: 124 - DNA, 51 bp, synthetic construct
  source 1..51: mol_type = other DNA
acgacgctcttccgatctnnnnnnnngcggttattgttttttttttttttt

SEQ ID NO: 125 - DNA, 51 bp, synthetic construct
  source 1..51: mol_type = other DNA
acgacgctcttccgatctnnnnnnnncatccagccattttttttttttttt

SEQ ID NO: 126 - DNA, 51 bp, synthetic construct
  source 1..51: mol_type = other DNA
acgacgctcttccgatctnnnnnnnnggctgccttattttttttttttttt

SEQ ID NO: 127 - DNA, 51 bp, synthetic construct
  source 1..51: mol_type = other DNA
acgacgctcttccgatctnnnnnnnnttctatagagttttttttttttttt

SEQ ID NO: 128 - DNA, 51 bp, synthetic construct
  source 1..51: mol_type = other DNA
acgacgctcttccgatctnnnnnnnntctagtcaagttttttttttttttt

SEQ ID NO: 129 - DNA, 51 bp, synthetic construct
  source 1..51: mol_type = other DNA
acgacgctcttccgatctnnnnnnnnacggagaatattttttttttttttt

SEQ ID NO: 130 - DNA, 51 bp, synthetic construct
  source 1..51: mol_type = other DNA
acgacgctcttccgatctnnnnnnnnattaacttaattttttttttttttt

SEQ ID NO: 131 - DNA, 51 bp, synthetic construct
  source 1..51: mol_type = other DNA
acgacgctcttccgatctnnnnnnnncgtattgagattttttttttttttt

SEQ ID NO: 132 - DNA, 51 bp, synthetic construct
  source 1..51: mol_type = other DNA
acgacgctcttccgatctnnnnnnnntagccagcaattttttttttttttt

SEQ ID NO: 133 - DNA, 51 bp, synthetic construct
  source 1..51: mol_type = other DNA
acgacgctcttccgatctnnnnnnnntcggcgtcgtttttttttttttttt

SEQ ID NO: 134 - DNA, 51 bp, synthetic construct
  source 1..51: mol_type = other DNA
acgacgctcttccgatctnnnnnnnngcctgatatattttttttttttttt

SEQ ID NO: 135 - DNA, 51 bp, synthetic construct
  source 1..51: mol_type = other DNA
acgacgctcttccgatctnnnnnnnngcctcagcatttttttttttttttt

SEQ ID NO: 136 - DNA, 51 bp, synthetic construct
  source 1..51: mol_type = other DNA
acgacgctcttccgatctnnnnnnnnatctaggttcttttttttttttttt

SEQ ID NO: 137 - DNA, 51 bp, synthetic construct
  source 1..51: mol_type = other DNA
acgacgctcttccgatctnnnnnnnngacgaggttgttttttttttttttt

SEQ ID NO: 138 - DNA, 51 bp, synthetic construct
  source 1..51: mol_type = other DNA
acgacgctcttccgatctnnnnnnnnctggttggttttttttttttttttt

SEQ ID NO: 139 - DNA, 51 bp, synthetic construct
  source 1..51: mol_type = other DNA
acgacgctcttccgatctnnnnnnnnccgcgcaggtttttttttttttttt

SEQ ID NO: 140 - DNA, 51 bp, synthetic construct
  source 1..51: mol_type = other DNA
acgacgctcttccgatctnnnnnnnnactctactggttttttttttttttt

SEQ ID NO: 141 - DNA, 51 bp, synthetic construct
  source 1..51: mol_type = other DNA
acgacgctcttccgatctnnnnnnnncctgagagcattttttttttttttt

SEQ ID NO: 142 - DNA, 51 bp, synthetic construct
  source 1..51: mol_type = other DNA
acgacgctcttccgatctnnnnnnnnaccagtataattttttttttttttt

SEQ ID NO: 143 - DNA, 51 bp, synthetic construct
  source 1..51: mol_type = other DNA
acgacgctcttccgatctnnnnnnnntccgccggtcttttttttttttttt

SEQ ID NO: 144 - DNA, 51 bp, synthetic construct
  source 1..51: mol_type = other DNA
acgacgctcttccgatctnnnnnnnntgcctaacttttttttttttttttt

SEQ ID NO: 145 - DNA, 51 bp, synthetic construct
  source 1..51: mol_type = other DNA
acgacgctcttccgatctnnnnnnnnttctctgagattttttttttttttt

SEQ ID NO: 146 - DNA, 51 bp, synthetic construct
  source 1..51: mol_type = other DNA
acgacgctcttccgatctnnnnnnnncctgcatcaattttttttttttttt

SEQ ID NO: 147 - DNA, 51 bp, synthetic construct
  source 1..51: mol_type = other DNA
acgacgctcttccgatctnnnnnnnntctgacgaggttttttttttttttt

SEQ ID NO: 148 - DNA, 51 bp, synthetic construct
  source 1..51: mol_type = other DNA
acgacgctcttccgatctnnnnnnnngattccggaattttttttttttttt

SEQ ID NO: 149 - DNA, 51 bp, synthetic construct
  source 1..51: mol_type = other DNA
acgacgctcttccgatctnnnnnnnntggcataacgttttttttttttttt

SEQ ID NO: 150 - DNA, 51 bp, synthetic construct
  source 1..51: mol_type = other DNA
acgacgctcttccgatctnnnnnnnntctctcatccttttttttttttttt

SEQ ID NO: 151 - DNA, 51 bp, synthetic construct
  source 1..51: mol_type = other DNA
acgacgctcttccgatctnnnnnnnnttcgctgcctttttttttttttttt

SEQ ID NO: 152 - DNA, 51 bp, synthetic construct
  source 1..51: mol_type = other DNA
acgacgctcttccgatctnnnnnnnnggattctatcttttttttttttttt

SEQ ID NO: 153 - DNA, 51 bp, synthetic construct
  source 1..51: mol_type = other DNA
acgacgctcttccgatctnnnnnnnntagaatagccttttttttttttttt

SEQ ID NO: 154 - DNA, 51 bp, synthetic construct
  source 1..51: mol_type = other DNA
acgacgctcttccgatctnnnnnnnngctcgaatcattttttttttttttt

SEQ ID NO: 155 - DNA, 51 bp, synthetic construct
  source 1..51: mol_type = other DNA
acgacgctcttccgatctnnnnnnnnggctcgagatttttttttttttttt

SEQ ID NO: 156 - DNA, 51 bp, synthetic construct
  source 1..51: mol_type = other DNA
acgacgctcttccgatctnnnnnnnntcctctccgtttttttttttttttt

SEQ ID NO: 157 - DNA, 51 bp, synthetic construct
  source 1..51: mol_type = other DNA
acgacgctcttccgatctnnnnnnnnataaccgttcttttttttttttttt

SEQ ID NO: 158 - DNA, 51 bp, synthetic construct
  source 1..51: mol_type = other DNA
acgacgctcttccgatctnnnnnnnnaggtctatggttttttttttttttt

SEQ ID NO: 159 - DNA, 51 bp, synthetic construct
  source 1..51: mol_type = other DNA
acgacgctcttccgatctnnnnnnnnagcaagaaccttttttttttttttt

SEQ ID NO: 160 - DNA, 51 bp, synthetic construct
  source 1..51: mol_type = other DNA
acgacgctcttccgatctnnnnnnnnttgatatgaattttttttttttttt

SEQ ID NO: 161 - DNA, 51 bp, synthetic construct
  source 1..51: mol_type = other DNA
acgacgctcttccgatctnnnnnnnntggcagaagtttttttttttttttt

SEQ ID NO: 162 - DNA, 51 bp, synthetic construct
  source 1..51: mol_type = other DNA
acgacgctcttccgatctnnnnnnnncttcattagattttttttttttttt

SEQ ID NO: 163 - DNA, 51 bp, synthetic construct
  source 1..51: mol_type = other DNA
acgacgctcttccgatctnnnnnnnnaatcgaactcttttttttttttttt

SEQ ID NO: 164 - DNA, 51 bp, synthetic construct
  source 1..51: mol_type = other DNA
acgacgctcttccgatctnnnnnnnnggacgacgcattttttttttttttt

SEQ ID NO: 165 - DNA, 51 bp, synthetic construct
  source 1..51: mol_type = other DNA
acgacgctcttccgatctnnnnnnnncgtctatgaattttttttttttttt

SEQ ID NO: 166 - DNA, 51 bp, synthetic construct
  source 1..51: mol_type = other DNA
acgacgctcttccgatctnnnnnnnncgaatctcctttttttttttttttt

SEQ ID NO: 167 - DNA, 51 bp, synthetic construct
  source 1..51: mol_type = other DNA
acgacgctcttccgatctnnnnnnnnggctattcgattttttttttttttt

SEQ ID NO: 168 - DNA, 51 bp, synthetic construct
  source 1..51: mol_type = other DNA
acgacgctcttccgatctnnnnnnnntctatcggtattttttttttttttt

SEQ ID NO: 169 - DNA, 51 bp, synthetic construct
  source 1..51: mol_type = other DNA
acgacgctcttccgatctnnnnnnnncgaaggcatgttttttttttttttt

SEQ ID NO: 170 - DNA, 51 bp, synthetic construct
  source 1..51: mol_type = other DNA
acgacgctcttccgatctnnnnnnnnaattgagagattttttttttttttt

SEQ ID NO: 171 - DNA, 51 bp, synthetic construct
  source 1..51: mol_type = other DNA
acgacgctcttccgatctnnnnnnnngtagttggatttttttttttttttt

SEQ ID NO: 172 - DNA, 51 bp, synthetic construct
  source 1..51: mol_type = other DNA
acgacgctcttccgatctnnnnnnnncctaagcggtttttttttttttttt

SEQ ID NO: 173 - DNA, 51 bp, synthetic construct
  source 1..51: mol_type = other DNA
acgacgctcttccgatctnnnnnnnncgtaaggagtttttttttttttttt

SEQ ID NO: 174 - DNA, 51 bp, synthetic construct
  source 1..51: mol_type = other DNA
acgacgctcttccgatctnnnnnnnnaagcatcctattttttttttttttt

SEQ ID NO: 175 - DNA, 51 bp, synthetic construct
  source 1..51: mol_type = other DNA
acgacgctcttccgatctnnnnnnnnctgaagagacttttttttttttttt

SEQ ID NO: 176 - DNA, 51 bp, synthetic construct
  source 1..51: mol_type = other DNA
acgacgctcttccgatctnnnnnnnnggcttctggattttttttttttttt

SEQ ID NO: 177 - DNA, 51 bp, synthetic construct
  source 1..51: mol_type = other DNA
acgacgctcttccgatctnnnnnnnnagcgatccgcttttttttttttttt

SEQ ID NO: 178 - DNA, 51 bp, synthetic construct
  source 1..51: mol_type = other DNA
acgacgctcttccgatctnnnnnnnnacgcttctctttttttttttttttt

SEQ ID NO: 179 - DNA, 51 bp, synthetic construct
  source 1..51: mol_type = other DNA
acgacgctcttccgatctnnnnnnnnatatgccatcttttttttttttttt

SEQ ID NO: 180 - DNA, 51 bp, synthetic construct
  source 1..51: mol_type = other DNA
acgacgctcttccgatctnnnnnnnnaagtacgttattttttttttttttt

SEQ ID NO: 181 - DNA, 51 bp, synthetic construct
  source 1..51: mol_type = other DNA
acgacgctcttccgatctnnnnnnnngaatgaggagttttttttttttttt

SEQ ID NO: 182 - DNA, 51 bp, synthetic construct
  source 1..51: mol_type = other DNA
acgacgctcttccgatctnnnnnnnnaggccggtaattttttttttttttt

SEQ ID NO: 183 - DNA, 51 bp, synthetic construct
  source 1..51: mol_type = other DNA
acgacgctcttccgatctnnnnnnnngccatcaactttttttttttttttt

SEQ ID NO: 184 - DNA, 51 bp, synthetic construct
  source 1..51: mol_type = other DNA
acgacgctcttccgatctnnnnnnnnactggtagatttttttttttttttt

SEQ ID NO: 185 - DNA, 51 bp, synthetic construct
  source 1..51: mol_type = other DNA
acgacgctcttccgatctnnnnnnnnatgagttctcttttttttttttttt

SEQ ID NO: 186 - DNA, 51 bp, synthetic construct
  source 1..51: mol_type = other DNA
acgacgctcttccgatctnnnnnnnnccatcggaccttttttttttttttt

SEQ ID NO: 187 - DNA, 51 bp, synthetic construct
  source 1..51: mol_type = other DNA
acgacgctcttccgatctnnnnnnnnggcatctaccttttttttttttttt

SEQ ID NO: 188 - DNA, 51 bp, synthetic construct
  source 1..51: mol_type = other DNA
acgacgctcttccgatctnnnnnnnnttctctactattttttttttttttt

SEQ ID NO: 189 - DNA, 51 bp, synthetic construct
  source 1..51: mol_type = other DNA
acgacgctcttccgatctnnnnnnnnccaggctcttttttttttttttttt

SEQ ID NO: 190 - DNA, 51 bp, synthetic construct
  source 1..51: mol_type = other DNA
acgacgctcttccgatctnnnnnnnnatccatcaggttttttttttttttt

SEQ ID NO: 191 - DNA, 51 bp, synthetic construct
  source 1..51: mol_type = other DNA
acgacgctcttccgatctnnnnnnnnctcggagcaattttttttttttttt

SEQ ID NO: 192 - DNA, 51 bp, synthetic construct
  source 1..51: mol_type = other DNA
acgacgctcttccgatctnnnnnnnnggcggttgacttttttttttttttt

SEQ ID NO: 193 - DNA, 10 bp, synthetic construct
  source 1..10: mol_type = other DNA
ttctcgcatg

SEQ ID NO: 194 - DNA, 10 bp, synthetic construct
  source 1..10: mol_type = other DNA
tcctaccagt

SEQ ID NO: 195 - DNA, 10 bp, synthetic construct
  source 1..10: mol_type = other DNA
gcgttggagc

SEQ ID NO: 196 - DNA, 10 bp, synthetic construct
  source 1..10: mol_type = other DNA
gatcttacgc

SEQ ID NO: 197 - DNA, 10 bp, synthetic construct
  source 1..10: mol_type = other DNA
ctgatggtca

SEQ ID NO: 198 - DNA, 10 bp, synthetic construct
  source 1..10: mol_type = other DNA
ccgagaatcc

SEQ ID NO: 199 - DNA, 10 bp, synthetic construct
  source 1..10: mol_type = other DNA
gccgcaacga

SEQ ID NO: 200 - DNA, 10 bp, synthetic construct
  source 1..10: mol_type = other DNA
tgagtctggc

SEQ ID NO: 201 - DNA, 10 bp, synthetic construct
  source 1..10: mol_type = other DNA
tgcggaccta

SEQ ID NO: 202 - DNA, 10 bp, synthetic construct
  source 1..10: mol_type = other DNA
acctcgttga

SEQ ID NO: 203 - DNA, 10 bp, synthetic construct
  source 1..10: mol_type = other DNA
acggaggcgg

SEQ ID NO: 204 - DNA, 10 bp, synthetic construct
  source 1..10: mol_type = other DNA
tagatctact

SEQ ID NO: 205 - DNA, 10 bp, synthetic construct
  source 1..10: mol_type = other DNA
aattaagact

SEQ ID NO: 206 - DNA, 10 bp, synthetic construct
  source 1..10: mol_type = other DNA
ccattgcgtt

SEQ ID NO: 207 - DNA, 10 bp, synthetic construct
  source 1..10: mol_type = other DNA
ttattcattc

SEQ ID NO: 208 - DNA, 10 bp, synthetic construct
  source 1..10: mol_type = other DNA
atctccgaac

SEQ ID NO: 209 - DNA, 10 bp, synthetic construct
  source 1..10: mol_type = other DNA
ttgacttcag

SEQ ID NO: 210 - DNA, 10 bp, synthetic construct
  source 1..10: mol_type = other DNA
ggcaggtatt

SEQ ID NO: 211 - DNA, 10 bp, synthetic construct
  source 1..10: mol_type = other DNA
agagctataa

SEQ ID NO: 212 - DNA, 10 bp, synthetic construct
  source 1..10: mol_type = other DNA
ctaagagaag

SEQ ID NO: 213 - DNA, 10 bp, synthetic construct
  source 1..10: mol_type = other DNA
actcaatagg

SEQ ID NO: 214 - DNA, 10 bp, synthetic construct
  source 1..10: mol_type = other DNA
cttgcgccgc

SEQ ID NO: 215 - DNA, 10 bp, synthetic construct
  source 1..10: mol_type = other DNA
aatcgtagcg

SEQ ID NO: 216 - DNA, 10 bp, synthetic construct
  source 1..10: mol_type = other DNA
ggtactgcct

SEQ ID NO: 217 - DNA, 10 bp, synthetic construct
  source 1..10: mol_type = other DNA
tagaattaac

SEQ ID NO: 218 - DNA, 10 bp, synthetic construct
  source 1..10: mol_type = other DNA
gccattctcc

SEQ ID NO: 219 - DNA, 10 bp, synthetic construct
  source 1..10: mol_type = other DNA
tgccggcaga

SEQ ID NO: 220 - DNA, 10 bp, synthetic construct
  source 1..10: mol_type = other DNA
ttaccgaggc

SEQ ID NO: 221 - DNA, 10 bp, synthetic construct
  source 1..10: mol_type = other DNA
atcatattag

SEQ ID NO: 222 - DNA, 10 bp, synthetic construct
  source 1..10: mol_type = other DNA
tggtcagcca

SEQ ID NO: 223 - DNA, 10 bp, synthetic construct
  source 1..10: mol_type = other DNA
actatgcaat

SEQ ID NO: 224 - DNA, 10 bp, synthetic construct
  source 1..10: mol_type = other DNA
cgacgcgact

SEQ ID NO: 225 - DNA, 10 bp, synthetic construct
  source 1..10: mol_type = other DNA
gatacggaac

SEQ ID NO: 226 - DNA, 10 bp, synthetic construct
  source 1..10: mol_type = other DNA
ttatccggat

SEQ ID NO: 227 - DNA, 10 bp, synthetic construct
  source 1..10: mol_type = other DNA
tagagtaata

SEQ ID NO: 228 - DNA, 10 bp, synthetic construct
  source 1..10: mol_type = other DNA
gcaggtccgt

SEQ ID NO: 229 - DNA, 10 bp, synthetic construct
  source 1..10: mol_type = other DNA
tcggccttac

SEQ ID NO: 230 - DNA, 10 bp, synthetic construct
  source 1..10: mol_type = other DNA
agaacgtctc

SEQ ID NO: 231 - DNA, 10 bp, synthetic construct
  source 1..10: mol_type = other DNA
ccagttccaa

SEQ ID NO: 232 - DNA, 10 bp, synthetic construct
  source 1..10: mol_type = other DNA
ggcgttaagg

SEQ ID NO: 233 - DNA, 10 bp, synthetic construct
  source 1..10: mol_type = other DNA
acttaacctt

SEQ ID NO: 234 - DNA, 10 bp, synthetic construct
  source 1..10: mol_type = other DNA
caaccgctaa

SEQ ID NO: 235 - DNA, 10 bp, synthetic construct
  source 1..10: mol_type = other DNA
gaccttgata

SEQ ID NO: 236 - DNA, 10 bp, synthetic construct
  source 1..10: mol_type = other DNA
tctgatacca

SEQ ID NO: 237 - DNA, 10 bp, synthetic construct
  source 1..10: mol_type = other DNA
gaagatcgag

SEQ ID NO: 238 - DNA, 10 bp, synthetic construct
  source 1..10: mol_type = other DNA
aggagcggta

SEQ ID NO: 239 - DNA, 10 bp, synthetic construct
  source 1..10: mol_type = other DNA
aagaagctag

SEQ ID NO: 240 - DNA, 10 bp, synthetic construct
  source 1..10: mol_type = other DNA
tccggcctcg

SEQ ID NO: 241 - DNA, 10 bp, synthetic construct
  source 1..10: mol_type = other DNA
agagaaggtt

SEQ ID NO: 242 - DNA, 10 bp, synthetic construct
  source 1..10: mol_type = other DNA
catactccga

SEQ ID NO: 243 - DNA, 10 bp, synthetic construct
  source 1..10: mol_type = other DNA
gctaacttgc

SEQ ID NO: 244 - DNA, 10 bp, synthetic construct
  source 1..10: mol_type = other DNA
aatccatctt

SEQ ID NO: 245 - DNA, 10 bp, synthetic construct
  source 1..10: mol_type = other DNA
ggctgagctc

SEQ ID NO: 246 - DNA, 10 bp, synthetic construct
  source 1..10: mol_type = other DNA
ccgattcctg

SEQ ID NO: 247 - DNA, 10 bp, synthetic construct
  source 1..10: mol_type = other DNA
accgccaacc

SEQ ID NO: 248 - DNA, 10 bp, synthetic construct
  source 1..10: mol_type = other DNA
tggcctgaag

SEQ ID NO: 249 - DNA, 10 bp, synthetic construct
  source 1..10: mol_type = other DNA
aacctcattc

SEQ ID NO: 250 - DNA, 10 bp, synthetic construct
  source 1..10: mol_type = other DNA
ataaggagca

SEQ ID NO: 251 - DNA, 10 bp, synthetic construct
  source 1..10: mol_type = other DNA
cgaacgccgg

SEQ ID NO: 252 - DNA, 10 bp, synthetic construct
  source 1..10: mol_type = other DNA
ggtatgcttg

SEQ ID NO: 253 - DNA, 10 bp, synthetic construct
  source 1..10: mol_type = other DNA
aacctgcgta

SEQ ID NO: 254 - DNA, 10 bp, synthetic construct
  source 1..10: mol_type = other DNA
ggcagacgcc

SEQ ID NO: 255 - DNA, 10 bp, synthetic construct
  source 1..10: mol_type = other DNA
tagccgtcat

SEQ ID NO: 256 - DNA, 10 bp, synthetic construct
  source 1..10: mol_type = other DNA
cctggaagag

SEQ ID NO: 257 - DNA, 10 bp, synthetic construct
  source 1..10: mol_type = other DNA
ggaggttcta

SEQ ID NO: 258 - DNA, 10 bp, synthetic construct
  source 1..10: mol_type = other DNA
ctagtagtct

SEQ ID NO: 259 - DNA, 10 bp, synthetic construct
  source 1..10: mol_type = other DNA
atcatcaacg

SEQ ID NO: 260 - DNA, 10 bp, synthetic construct
  source 1..10: mol_type = other DNA
acgcgagatt

SEQ ID NO: 261 - DNA, 10 bp, synthetic construct
  source 1..10: mol_type = other DNA
gaagaggcat

SEQ ID NO: 262 - DNA, 10 bp, synthetic construct
  source 1..10: mol_type = other DNA
ggtatccgcc

SEQ ID NO: 263 - DNA, 10 bp, synthetic construct
  source 1..10: mol_type = other DNA
aactaggcgc

SEQ ID NO: 264 - DNA, 10 bp, synthetic construct
  source 1..10: mol_type = other DNA
tcgctaagca

SEQ ID NO: 265 - DNA, 10 bp, synthetic construct
  source 1..10: mol_type = other DNA
tatatactaa

SEQ ID NO: 266 - DNA, 10 bp, synthetic construct
  source 1..10: mol_type = other DNA
acttgctaga

SEQ ID NO: 267 - DNA, 10 bp, synthetic construct
  source 1..10: mol_type = other DNA
aaccattgga

SEQ ID NO: 268 - DNA, 10 bp, synthetic construct
  source 1..10: mol_type = other DNA
tcgcggttgg

SEQ ID NO: 269 - DNA, 10 bp, synthetic construct
  source 1..10: mol_type = other DNA
cgtagttacc

SEQ ID NO: 270 - DNA, 10 bp, synthetic construct
  source 1..10: mol_type = other DNA
tccaatcatc

SEQ ID NO: 271 - DNA, 10 bp, synthetic construct
  source 1..10: mol_type = other DNA
aatcgataat

SEQ ID NO: 272 - DNA, 10 bp, synthetic construct
  source 1..10: mol_type = other DNA
ccattatcta

SEQ ID NO: 273 - DNA, 10 bp, synthetic construct
  source 1..10: mol_type = other DNA
tcaacgtaag

SEQ ID NO: 274 - DNA, 10 bp, synthetic construct
  source 1..10: mol_type = other DNA
tctaatagta

SEQ ID NO: 275 - DNA, 10 bp, synthetic construct
  source 1..10: mol_type = other DNA
aaccgctggt

SEQ ID NO: 276 - DNA, 10 bp, synthetic construct
  source 1..10: mol_type = other DNA
gatcgcttct

SEQ ID NO: 277 - DNA, 10 bp, synthetic construct
  source 1..10: mol_type = other DNA
ctaactagat

SEQ ID NO: 278 - DNA, 10 bp, synthetic construct
  source 1..10: mol_type = other DNA
gctggaactt

SEQ ID NO: 279 - DNA, 10 bp, synthetic construct
  source 1..10: mol_type = other DNA
aggttagttc

SEQ ID NO: 280 - DNA, 10 bp, synthetic construct
  source 1..10: mol_type = other DNA
cattcgacgg

SEQ ID NO: 281 - DNA, 10 bp, synthetic construct
  source 1..10: mol_type = other DNA
cattcaatca

SEQ ID NO: 282 - DNA, 10 bp, synthetic construct
  source 1..10: mol_type = other DNA
cggattagaa

SEQ ID NO: 283 - DNA, 10 bp, synthetic construct
  source 1..10: mol_type = other DNA
atcggctatc

SEQ ID NO: 284 - DNA, 10 bp, synthetic construct
  source 1..10: mol_type = other DNA
ccttgatcgt

SEQ ID NO: 285 - DNA, 10 bp, synthetic construct
  source 1..10: mol_type = other DNA
acgaagtcaa

SEQ ID NO: 286 - DNA, 10 bp, synthetic construct
  source 1..10: mol_type = other DNA
ttacctcgac

SEQ ID NO: 287 - DNA, 10 bp, synthetic construct
  source 1..10: mol_type = other DNA
ggaggatagc

SEQ ID NO: 288 - DNA, 10 bp, synthetic construct
  source 1..10: mol_type = other DNA
ggctctctat

SEQ ID NO: 289 - DNA, 10 bp, synthetic construct
  source 1..10: mol_type = other DNA
ggttggcgac

SEQ ID NO: 290 - DNA, 10 bp, synthetic construct
  source 1..10: mol_type = other DNA
gtagatcgtt

SEQ ID NO: 291 - DNA, 10 bp, synthetic construct
  source 1..10: mol_type = other DNA
gaggtcggtt

SEQ ID NO: 292 - DNA, 10 bp, synthetic construct
  source 1..10: mol_type = other DNA
acgcgctcct

SEQ ID NO: 293 - DNA, 10 bp, synthetic construct
  source 1..10: mol_type = other DNA
agcgtcgtat

SEQ ID NO: 294 - DNA, 10 bp, synthetic construct
  source 1..10: mol_type = other DNA
gaccaatgcg

SEQ ID NO: 295 - DNA, 10 bp, synthetic construct
  source 1..10: mol_type = other DNA
aggtagagct

SEQ ID NO: 296 - DNA, 10 bp, synthetic construct
  source 1..10: mol_type = other DNA
ttgcagcatt

SEQ ID NO: 297 - DNA, 10 bp, synthetic construct
  source 1..10: mol_type = other DNA
gtagatgcgc

SEQ ID NO: 298 - DNA, 10 bp, synthetic construct
  source 1..10: mol_type = other DNA
tcggtaaggc

SEQ ID NO: 299 - DNA, 10 bp, synthetic construct
  source 1..10: mol_type = other DNA
acgatagact

SEQ ID NO: 300 - DNA, 10 bp, synthetic construct
  source 1..10: mol_type = other DNA
gcggccaatc

SEQ ID NO: 301 - DNA, 10 bp, synthetic construct
  source 1..10: mol_type = other DNA
acgcgtatcg

SEQ ID NO: 302 - DNA, 10 bp, synthetic construct
  source 1..10: mol_type = other DNA
catgactcaa

SEQ ID NO: 303 - DNA, 10 bp, synthetic construct
  source 1..10: mol_type = other DNA
actccgccaa

SEQ ID NO: 304 - DNA, 10 bp, synthetic construct
  source 1..10: mol_type = other DNA
acgttgaatg

SEQ ID NO: 305 - DNA, 10 bp, synthetic construct
  source 1..10: mol_type = other DNA
aggactgcga

SEQ ID NO: 306 - DNA, 10 bp, synthetic construct
  source 1..10: mol_type = other DNA
actcgacgcc

SEQ ID NO: 307 - DNA, 10 bp, synthetic construct
  source 1..10: mol_type = other DNA
cctatcataa

SEQ ID NO: 308 - DNA, 10 bp, synthetic construct
  source 1..10: mol_type = other DNA
aatccggtca

SEQ ID NO: 309 - DNA, 10 bp, synthetic construct
  source 1..10: mol_type = other DNA
ctattaacca

SEQ ID NO: 310 - DNA, 10 bp, synthetic construct
  source 1..10: mol_type = other DNA
gatccagcgt

SEQ ID NO: 311 - DNA, 10 bp, synthetic construct
  source 1..10: mol_type = other DNA
tgagactcta

SEQ ID NO: 312 - DNA, 10 bp, synthetic construct
  source 1..10: mol_type = other DNA
gcggagtcga

SEQ ID NO: 313 - DNA, 10 bp, synthetic construct
  source 1..10: mol_type = other DNA
gaggcttatt

SEQ ID NO: 314 - DNA, 10 bp, synthetic construct
  source 1..10: mol_type = other DNA
cgccaggcat

SEQ ID NO: 315 - DNA, 10 bp, synthetic construct
  source 1..10: mol_type = other DNA
aataccagtt

SEQ ID NO: 316 - DNA, 10 bp, synthetic construct
  source 1..10: mol_type = other DNA
gcggttattg

SEQ ID NO: 317 - DNA, 10 bp, synthetic construct
  source 1..10: mol_type = other DNA
catccagcca

SEQ ID NO: 318 - DNA, 10 bp, synthetic construct
  source 1..10: mol_type = other DNA
ggctgcctta

SEQ ID NO: 319 - DNA, 10 bp, synthetic construct
  source 1..10: mol_type = other DNA
ttctatagag

SEQ ID NO: 320 - DNA, 10 bp, synthetic construct
  source 1..10: mol_type = other DNA
tctagtcaag

SEQ ID NO: 321 - DNA, 10 bp, synthetic construct
  source 1..10: mol_type = other DNA
acggagaata

SEQ ID NO: 322 - DNA, 10 bp, synthetic construct
  source 1..10: mol_type = other DNA
attaacttaa

SEQ ID NO: 323 - DNA, 10 bp, synthetic construct
  source 1..10: mol_type = other DNA
cgtattgaga

SEQ ID NO: 324 - DNA, 10 bp, synthetic construct
  source 1..10: mol_type = other DNA
tagccagcaa

SEQ ID NO: 325 - DNA, 10 bp, synthetic construct
  source 1..10: mol_type = other DNA
tcggcgtcgt

SEQ ID NO: 326 - DNA, 10 bp, synthetic construct
  source 1..10: mol_type = other DNA
gcctgatata

SEQ ID NO: 327 - DNA, 10 bp, synthetic construct
  source 1..10: mol_type = other DNA
gcctcagcat

SEQ ID NO: 328 - DNA, 10 bp, synthetic construct
  source 1..10: mol_type = other DNA
atctaggttc

SEQ ID NO: 329 - DNA, 10 bp, synthetic construct
  source 1..10: mol_type = other DNA
gacgaggttg

SEQ ID NO: 330 - DNA, 10 bp, synthetic construct
  source 1..10: mol_type = other DNA
ctggttggtt

SEQ ID NO: 331 - DNA, 10 bp, synthetic construct
  source 1..10: mol_type = other DNA
ccgcgcaggt

SEQ ID NO: 332 - DNA, 10 bp, synthetic construct
  source 1..10: mol_type = other DNA
actctactgg

SEQ ID NO: 333 - DNA, 10 bp, synthetic construct
  source 1..10: mol_type = other DNA
cctgagagca

SEQ ID NO: 334 - DNA, 10 bp, synthetic construct
  source 1..10: mol_type = other DNA
accagtataa

SEQ ID NO: 335 - DNA, 10 bp, synthetic construct
  source 1..10: mol_type = other DNA
tccgccggtc

SEQ ID NO: 336 - DNA, 10 bp, synthetic construct
  source 1..10: mol_type = other DNA
tgcctaactt

SEQ ID NO: 337 - DNA, 10 bp, synthetic construct
  source 1..10: mol_type = other DNA
ttctctgaga

SEQ ID NO: 338 - DNA, 10 bp, synthetic construct
  source 1..10: mol_type = other DNA
cctgcatcaa

SEQ ID NO: 339 - DNA, 10 bp, synthetic construct
  source 1..10: mol_type = other DNA
tctgacgagg

SEQ ID NO: 340 - DNA, 10 bp, synthetic construct
  source 1..10: mol_type = other DNA
gattccggaa

SEQ ID NO: 341 - DNA, 10 bp, synthetic construct
  source 1..10: mol_type = other DNA
tggcataacg

SEQ ID NO: 342 - DNA, 10 bp, synthetic construct
  source 1..10: mol_type = other DNA
tctctcatcc

SEQ ID NO: 343 - DNA, 10 bp, synthetic construct
  source 1..10: mol_type = other DNA
ttcgctgcct

SEQ ID NO: 344 - DNA, 10 bp, synthetic construct
  source 1..10: mol_type = other DNA
ggattctatc

SEQ ID NO: 345 - DNA, 10 bp, synthetic construct
  source 1..10: mol_type = other DNA
tagaatagcc

SEQ ID NO: 346 - DNA, 10 bp, synthetic construct
  source 1..10: mol_type = other DNA
gctcgaatca

SEQ ID NO: 347 - DNA, 10 bp, synthetic construct
  source 1..10: mol_type = other DNA
ggctcgagat

SEQ ID NO: 348 - DNA, 10 bp, synthetic construct
  source 1..10: mol_type = other DNA
tcctctccgt

SEQ ID NO: 349 - DNA, 10 bp, synthetic construct
  source 1..10: mol_type = other DNA
ataaccgttc

SEQ ID NO: 350 - DNA, 10 bp, synthetic construct
  source 1..10: mol_type = other DNA
aggtctatgg

SEQ ID NO: 351 - DNA, 10 bp, synthetic construct
  source 1..10: mol_type = other DNA
agcaagaacc

SEQ ID NO: 352 - DNA, 10 bp, synthetic construct
  source 1..10: mol_type = other DNA
ttgatatgaa

SEQ ID NO: 353 - DNA, 10 bp, synthetic construct
  source 1..10: mol_type = other DNA
tggcagaagt

SEQ ID NO: 354 - DNA, 10 bp, synthetic construct
  source 1..10: mol_type = other DNA
cttcattaga

SEQ ID NO: 355 - DNA, 10 bp, synthetic construct
  source 1..10: mol_type = other DNA
aatcgaactc

SEQ ID NO: 356 - DNA, 10 bp, synthetic construct
  source 1..10: mol_type = other DNA
ggacgacgca

SEQ ID NO: 357 - DNA, 10 bp, synthetic construct
  source 1..10: mol_type = other DNA
cgtctatgaa

SEQ ID NO: 358 - DNA, 10 bp, synthetic construct
  source 1..10: mol_type = other DNA
cgaatctcct

SEQ ID NO: 359 - DNA, 10 bp, synthetic construct
  source 1..10: mol_type = other DNA
ggctattcga

SEQ ID NO: 360 - DNA, 10 bp, synthetic construct
  source 1..10: mol_type = other DNA
tctatcggta

SEQ ID NO: 361 - DNA, 10 bp, synthetic construct
  source 1..10: mol_type = other DNA
cgaaggcatg

SEQ ID NO: 362 - DNA, 10 bp, synthetic construct
  source 1..10: mol_type = other DNA
aattgagaga

SEQ ID NO: 363 - DNA, 10 bp, synthetic construct
  source 1..10: mol_type = other DNA
gtagttggat

SEQ ID NO: 364 - DNA, 10 bp, synthetic construct
  source 1..10: mol_type = other DNA
cctaagcggt

SEQ ID NO: 365 - DNA, 10 bp, synthetic construct
  source 1..10: mol_type = other DNA
cgtaaggagt

SEQ ID NO: 366 - DNA, 10 bp, synthetic construct
  source 1..10: mol_type = other DNA
aagcatccta

SEQ ID NO: 367 - DNA, 10 bp, synthetic construct
  source 1..10: mol_type = other DNA
ctgaagagac

SEQ ID NO: 368 - DNA, 10 bp, synthetic construct
  source 1..10: mol_type = other DNA
ggcttctgga

SEQ ID NO: 369 - DNA, 10 bp, synthetic construct
  source 1..10: mol_type = other DNA
agcgatccgc

SEQ ID NO: 370 - DNA, 10 bp, synthetic construct
  source 1..10: mol_type = other DNA
acgcttctct

SEQ ID NO: 371 - DNA, 10 bp, synthetic construct
  source 1..10: mol_type = other DNA
atatgccatc

SEQ ID NO: 372 - DNA, 10 bp, synthetic construct
  source 1..10: mol_type = other DNA
aagtacgtta

SEQ ID NO: 373 - DNA, 10 bp, synthetic construct
  source 1..10: mol_type = other DNA
gaatgaggag

SEQ ID NO: 374 - DNA, 10 bp, synthetic construct
  source 1..10: mol_type = other DNA
aggccggtaa

SEQ ID NO: 375 - DNA, 10 bp, synthetic construct
  source 1..10: mol_type = other DNA
gccatcaact

SEQ ID NO: 376 - DNA, 10 bp, synthetic construct
  source 1..10: mol_type = other DNA
actggtagat

SEQ ID NO: 377 - DNA, 10 bp, synthetic construct
  source 1..10: mol_type = other DNA
atgagttctc

SEQ ID NO: 378 - DNA, 10 bp, synthetic construct
  source 1..10: mol_type = other DNA
ccatcggacc

SEQ ID NO: 379 - DNA, 10 bp, synthetic construct
  source 1..10: mol_type = other DNA
ggcatctacc

SEQ ID NO: 380 - DNA, 10 bp, synthetic construct
  source 1..10: mol_type = other DNA
ttctctacta

SEQ ID NO: 381 - DNA, 10 bp, synthetic construct
  source 1..10: mol_type = other DNA
ccaggctctt

SEQ ID NO: 382 - DNA, 10 bp, synthetic construct
  source 1..10: mol_type = other DNA
atccatcagg

SEQ ID NO: 383 - DNA, 10 bp, synthetic construct
  source 1..10: mol_type = other DNA
ctcggagcaa

SEQ ID NO: 384 - DNA, 10 bp, synthetic construct
  source 1..10: mol_type = other DNA
ggcggttgac

SEQ ID NO: 385 - DNA, 42 bp, synthetic construct
  source 1..42: mol_type = other DNA
acgacgctcttccgatctnnnnnnnncggtcaagaannnnnn

SEQ ID NO: 386 - DNA, 42 bp, synthetic construct
  source 1..42: mol_type = other DNA
acgacgctcttccgatctnnnnnnnncgctcctaacnnnnnn

SEQ ID NO: 387 - DNA, 42 bp, synthetic construct
  source 1..42: mol_type = other DNA
acgacgctcttccgatctnnnnnnnnatccatgactnnnnnn

SEQ ID NO: 388 - DNA, 42 bp, synthetic construct
  source 1..42: mol_type = other DNA
acgacgctcttccgatctnnnnnnnnaacctggtctnnnnnn

SEQ ID NO: 389 - DNA, 42 bp, synthetic construct
  source 1..42: mol_type = other DNA
acgacgctcttccgatctnnnnnnnnaccgaagaccnnnnnn

SEQ ID NO: 390 - DNA, 42 bp, synthetic construct
  source 1..42: mol_type = other DNA
acgacgctcttccgatctnnnnnnnnggtaccggcannnnnn

SEQ ID NO: 391 - DNA, 42 bp, synthetic construct
  source 1..42: mol_type = other DNA
acgacgctcttccgatctnnnnnnnnaagccagttannnnnn

SEQ ID NO: 392 - DNA, 42 bp, synthetic construct
  source 1..42: mol_type = other DNA
acgacgctcttccgatctnnnnnnnntcttgccgacnnnnnn

SEQ ID NO: 393 - DNA, 42 bp, synthetic construct
  source 1..42: mol_type = other DNA
acgacgctcttccgatctnnnnnnnnaagaccgttgnnnnnn

SEQ ID NO: 394 - DNA, 42 bp, synthetic construct
  source 1..42: mol_type = other DNA
acgacgctcttccgatctnnnnnnnnaggttagcatnnnnnn

SEQ ID NO: 395 - DNA, 42 bp, synthetic construct
  source 1..42: mol_type = other DNA
acgacgctcttccgatctnnnnnnnnttcgcctccannnnnn

SEQ ID NO: 396 - DNA, 42 bp, synthetic construct
  source 1..42: mol_type = other DNA
acgacgctcttccgatctnnnnnnnnagagccaaggnnnnnn

SEQ ID NO: 397 - DNA, 42 bp, synthetic construct
  source 1..42: mol_type = other DNA
acgacgctcttccgatctnnnnnnnnaataccatccnnnnnn

SEQ ID NO: 398 - DNA, 42 bp, synthetic construct
  source 1..42: mol_type = other DNA
acgacgctcttccgatctnnnnnnnnagctctcctcnnnnnn

SEQ ID NO: 399 - DNA, 42 bp, synthetic construct
  source 1..42: mol_type = other DNA
acgacgctcttccgatctnnnnnnnncttgattgccnnnnnn

SEQ ID NO: 400 - DNA, 42 bp, synthetic construct
  source 1..42: mol_type = other DNA
acgacgctcttccgatctnnnnnnnnagcttatccgnnnnnn

SEQ ID NO: 401 - DNA, 42 bp, synthetic construct
  source 1..42: mol_type = other DNA
acgacgctcttccgatctnnnnnnnnaagaatctgannnnnn

SEQ ID NO: 402 - DNA, 42 bp, synthetic construct
  source 1..42: mol_type = other DNA
acgacgctcttccgatctnnnnnnnncatctctgcannnnnn

SEQ ID NO: 403 - DNA, 42 bp, synthetic construct
  source 1..42: mol_type = other DNA
acgacgctcttccgatctnnnnnnnnacctggccaannnnnn

SEQ ID NO: 404 - DNA, 42 bp, synthetic construct
  source 1..42: mol_type = other DNA
acgacgctcttccgatctnnnnnnnntaactggttannnnnn

SEQ ID NO: 405 - DNA, 42 bp, synthetic construct
  source 1..42: mol_type = other DNA
acgacgctcttccgatctnnnnnnnnttgctaacggnnnnnn

SEQ ID NO: 406 - DNA, 42 bp, synthetic construct
  source 1..42: mol_type = other DNA
acgacgctcttccgatctnnnnnnnnactagagagtnnnnnn

SEQ ID NO: 407 - DNA, 42 bp, synthetic construct
  source 1..42: mol_type = other DNA
acgacgctcttccgatctnnnnnnnnaatgccgcttnnnnnn

SEQ ID NO: 408 - DNA, 42 bp, synthetic construct
  source 1..42: mol_type = other DNA
acgacgctcttccgatctnnnnnnnntatagacgcannnnnn

SEQ ID NO: 409 - DNA, 42 bp, synthetic construct
  source 1..42: mol_type = other DNA
acgacgctcttccgatctnnnnnnnntcaatcgcatnnnnnn

SEQ ID NO: 410 - DNA, 42 bp, synthetic construct
  source 1..42: mol_type = other DNA
acgacgctcttccgatctnnnnnnnnttcttaataannnnnn

SEQ ID NO: 411 - DNA, 42 bp, synthetic construct
  source 1..42: mol_type = other DNA
acgacgctcttccgatctnnnnnnnngtcctagaggnnnnnn

SEQ ID NO: 412 - DNA, 42 bp, synthetic construct
  source 1..42: mol_type = other DNA
acgacgctcttccgatctnnnnnnnnatattgatacnnnnnn

SEQ ID NO: 413 - DNA, 42 bp, synthetic construct
  source 1..42: mol_type = other DNA
acgacgctcttccgatctnnnnnnnnccgctgccagnnnnnn

SEQ ID NO: 414 - DNA, 42 bp, synthetic construct
  source 1..42: mol_type = other DNA
acgacgctcttccgatctnnnnnnnncctagtacgtnnnnnn

SEQ ID NO: 415 - DNA, 42 bp, synthetic construct
  source 1..42: mol_type = other DNA
acgacgctcttccgatctnnnnnnnncaattaccgtnnnnnn

SEQ ID NO: 416 - DNA, 42 bp, synthetic construct
  source 1..42: mol_type = other DNA
acgacgctcttccgatctnnnnnnnnggccgtagtcnnnnnn

SEQ ID NO: 417 - DNA, 42 bp, synthetic construct
  source 1..42: mol_type = other DNA
acgacgctcttccgatctnnnnnnnncgattacggcnnnnnn

SEQ ID NO: 418 - DNA, 42 bp, synthetic construct
  source 1..42: mol_type = other DNA
acgacgctcttccgatctnnnnnnnntaatgaacgannnnnn

SEQ ID NO: 419 - DNA, 42 bp, synthetic construct
  source 1..42: mol_type = other DNA
acgacgctcttccgatctnnnnnnnnccgttccttannnnnn

SEQ ID NO: 420 - DNA, 42 bp, synthetic construct
  source 1..42: mol_type = other DNA
acgacgctcttccgatctnnnnnnnnggtaccatatnnnnnn

SEQ ID NO: 421 - DNA, 42 bp, synthetic construct
  source 1..42: mol_type = other DNA
acgacgctcttccgatctnnnnnnnnccgattcgcannnnnn

SEQ ID NO: 422 - DNA, 42 bp, synthetic construct
  source 1..42: mol_type = other DNA
acgacgctcttccgatctnnnnnnnnatggctctgcnnnnnn

SEQ ID NO: 423 - DNA, 42 bp, synthetic construct
  source 1..42: mol_type = other DNA
acgacgctcttccgatctnnnnnnnngtataatacgnnnnnn

SEQ ID NO: 424 - DNA, 42 bp, synthetic construct
  source 1..42: mol_type = other DNA
acgacgctcttccgatctnnnnnnnnatcagcaagtnnnnnn

SEQ ID NO: 425 - DNA, 42 bp, synthetic construct
  source 1..42: mol_type = other DNA
acgacgctcttccgatctnnnnnnnnggcgaactcgnnnnnn

SEQ ID NO: 426 - DNA, 42 bp, synthetic construct
  source 1..42: mol_type = other DNA
acgacgctcttccgatctnnnnnnnnttaattgaatnnnnnn

SEQ ID NO: 427 - DNA, 42 bp, synthetic construct
  source 1..42: mol_type = other DNA
acgacgctcttccgatctnnnnnnnnttaggaccggnnnnnn

SEQ ID NO: 428 - DNA, 42 bp, synthetic construct
  source 1..42: mol_type = other DNA
acgacgctcttccgatctnnnnnnnnaagtaagagcnnnnnn

SEQ ID NO: 429 - DNA, 42 bp, synthetic construct
  source 1..42: mol_type = other DNA
acgacgctcttccgatctnnnnnnnnccttggtccannnnnn

SEQ ID NO: 430 - DNA, 42 bp, synthetic construct
  source 1..42: mol_type = other DNA
acgacgctcttccgatctnnnnnnnncatcagaatgnnnnnn

SEQ ID NO: 431 - DNA, 42 bp, synthetic construct
  source 1..42: mol_type = other DNA
acgacgctcttccgatctnnnnnnnnttatagcagannnnnn

SEQ ID NO: 432 - DNA, 42 bp, synthetic construct
  source 1..42: mol_type = other DNA
acgacgctcttccgatctnnnnnnnnttacttggaannnnnn

SEQ ID NO: 433 - DNA, 42 bp, synthetic construct
  source 1..42: mol_type = other DNA
acgacgctcttccgatctnnnnnnnngctcagccggnnnnnn

SEQ ID NO: 434 - DNA, 42 bp, synthetic construct
  source 1..42: mol_type = other DNA
acgacgctcttccgatctnnnnnnnnacgtccgcagnnnnnn

SEQ ID NO: 435 - DNA, 42 bp, synthetic construct
  source 1..42: mol_type = other DNA
acgacgctcttccgatctnnnnnnnnttgactgacgnnnnnn

SEQ ID NO: 436 - DNA, 42 bp, synthetic construct
  source 1..42: mol_type = other DNA
acgacgctcttccgatctnnnnnnnnttgcgaggcannnnnn

SEQ ID NO: 437 - DNA, 42 bp, synthetic construct
  source 1..42: mol_type = other DNA
acgacgctcttccgatctnnnnnnnnttccaaccgcnnnnnn

SEQ ID NO: 438 - DNA, 42 bp, synthetic construct
  source 1..42: mol_type = other DNA
acgacgctcttccgatctnnnnnnnntaaccttcggnnnnnn

SEQ ID NO: 439 - DNA, 42 bp, synthetic construct
  source 1..42: mol_type = other DNA
acgacgctcttccgatctnnnnnnnntcaagccgatnnnnnn

SEQ ID NO: 440 - DNA, 42 bp, synthetic construct
  source 1..42: mol_type = other DNA
acgacgctcttccgatctnnnnnnnncttgcaacctnnnnnn

SEQ ID NO: 441 - DNA, 42 bp, synthetic construct
  source 1..42: mol_type = other DNA
acgacgctcttccgatctnnnnnnnnccatcgcgaannnnnn

SEQ ID NO: 442 - DNA, 42 bp, synthetic construct
  source 1..42: mol_type = other DNA
acgacgctcttccgatctnnnnnnnntagacttcttnnnnnn

SEQ ID NO: 443 - DNA, 42 bp, synthetic construct
  source 1..42: mol_type = other DNA
acgacgctcttccgatctnnnnnnnngtccttaagannnnnn

SEQ ID NO: 444 - DNA, 42 bp, synthetic construct
  source 1..42: mol_type = other DNA
acgacgctcttccgatctnnnnnnnnagtaacggtcnnnnnn

SEQ ID NO: 445 - DNA, 42 bp, synthetic construct
  source 1..42: mol_type = other DNA
acgacgctcttccgatctnnnnnnnngttcgtcagannnnnn

SEQ ID NO: 446 - DNA, 42 bp, synthetic construct
  source 1..42: mol_type = other DNA
acgacgctcttccgatctnnnnnnnncgcctaatgcnnnnnn

SEQ ID NO: 447 - DNA, 42 bp, synthetic construct
  source 1..42: mol_type = other DNA
acgacgctcttccgatctnnnnnnnnaccggaattannnnnn

SEQ ID NO: 448 - DNA, 42 bp, synthetic construct
  source 1..42: mol_type = other DNA
acgacgctcttccgatctnnnnnnnntaggccatagnnnnnn

SEQ ID NO: 449 - DNA, 42 bp, synthetic construct
  source 1..42: mol_type = other DNA
acgacgctcttccgatctnnnnnnnntaactcttagnnnnnn

SEQ ID NO: 450 - DNA, 42 bp, synthetic construct
  source 1..42: mol_type = other DNA
acgacgctcttccgatctnnnnnnnntatgagttaannnnnn

SEQ ID NO: 451 - DNA, 42 bp, synthetic construct
  source 1..42: mol_type = other DNA
acgacgctcttccgatctnnnnnnnntatcatgatcnnnnnn

SEQ ID NO: 452 - DNA, 42 bp, synthetic construct
  source 1..42: mol_type = other DNA
acgacgctcttccgatctnnnnnnnngagcatatggnnnnnn

SEQ ID NO: 453 - DNA, 42 bp, synthetic construct
  source 1..42: mol_type = other DNA
acgacgctcttccgatctnnnnnnnntaacgatccannnnnn

SEQ ID NO: 454 - DNA, 42 bp, synthetic construct
  source 1..42: mol_type = other DNA
acgacgctcttccgatctnnnnnnnncggcgtaactnnnnnn

SEQ ID NO: 455 - DNA, 42 bp, synthetic construct
  source 1..42: mol_type = other DNA
acgacgctcttccgatctnnnnnnnncgtcgcagccnnnnnn

SEQ ID NO: 456 - DNA, 42 bp, synthetic construct
  source 1..42: mol_type = other DNA
acgacgctcttccgatctnnnnnnnngtagctccatnnnnnn

SEQ ID NO: 457 - DNA, 42 bp, synthetic construct
  source 1..42: mol_type = other DNA
acgacgctcttccgatctnnnnnnnnttgccttggcnnnnnn

SEQ ID NO: 458 - DNA, 42 bp, synthetic construct
  source 1..42: mol_type = other DNA
acgacgctcttccgatctnnnnnnnntgctaattctnnnnnn

SEQ ID NO: 459 - DNA, 42 bp, synthetic construct
  source 1..42: mol_type = other DNA
acgacgctcttccgatctnnnnnnnngtcctacttgnnnnnn

SEQ ID NO: 460 - DNA, 42 bp, synthetic construct
  source 1..42: mol_type = other DNA
acgacgctcttccgatctnnnnnnnnggtaggttagnnnnnn

SEQ ID NO: 461 - DNA, 42 bp, synthetic construct
  source 1..42: mol_type = other DNA
acgacgctcttccgatctnnnnnnnngagcatcattnnnnnn

SEQ ID NO: 462 - DNA, 42 bp, synthetic construct
  source 1..42: mol_type = other DNA
acgacgctcttccgatctnnnnnnnnccgctccggcnnnnnn

SEQ ID NO: 463 - DNA, 42 bp, synthetic construct
  source 1..42: mol_type = other DNA
acgacgctcttccgatctnnnnnnnnttcttccggtnnnnnn

SEQ ID NO: 464 - DNA, 42 bp, synthetic construct
  source 1..42: mol_type = other DNA
acgacgctcttccgatctnnnnnnnnaggagagaacnnnnnn

SEQ ID NO: 465 - DNA, 42 bp, synthetic construct
  source 1..42: mol_type = other DNA
acgacgctcttccgatctnnnnnnnntaactcaattnnnnnn

SEQ ID NO: 466 - DNA, 42 bp, synthetic construct
  source 1..42: mol_type = other DNA
acgacgctcttccgatctnnnnnnnnactataggttnnnnnn

SEQ ID NO: 467 - DNA, 42 bp, synthetic construct
  source 1..42: mol_type = other DNA
acgacgctcttccgatctnnnnnnnncaagatgccgnnnnnn

SEQ ID NO: 468 - DNA, 42 bp, synthetic construct
  source 1..42: mol_type = other DNA
acgacgctcttccgatctnnnnnnnnaacgtctagtnnnnnn

SEQ ID NO: 469 - DNA, 42 bp, synthetic construct
  source 1..42: mol_type = other DNA
acgacgctcttccgatctnnnnnnnnaggtatactcnnnnnn

SEQ ID NO: 470 - DNA, 42 bp, synthetic construct
  source 1..42: mol_type = other DNA
acgacgctcttccgatctnnnnnnnnttcataggacnnnnnn

SEQ ID NO: 471 - DNA, 42 bp, synthetic construct
  source 1..42: mol_type = other DNA
acgacgctcttccgatctnnnnnnnnggaggcctccnnnnnn

SEQ ID NO: 472 - DNA, 42 bp, synthetic construct
  source 1..42: mol_type = other DNA
acgacgctcttccgatctnnnnnnnnttcaatataannnnnn

SEQ ID NO: 473 - DNA, 42 bp, synthetic construct
  source 1..42: mol_type = other DNA
acgacgctcttccgatctnnnnnnnnacgtcatatannnnnn

SEQ ID NO: 474 - DNA, 42 bp, synthetic construct
  source 1..42: mol_type = other DNA
acgacgctcttccgatctnnnnnnnnttgaccaggannnnnn

SEQ ID NO: 475 - DNA, 42 bp, synthetic construct
  source 1..42: mol_type = other DNA
acgacgctcttccgatctnnnnnnnncggttgcgcgnnnnnn

SEQ ID NO: 476 - DNA, 42 bp, synthetic construct
  source 1..42: mol_type = other DNA
acgacgctcttccgatctnnnnnnnncaaggaggtcnnnnnn

SEQ ID NO: 477 - DNA, 42 bp, synthetic construct
  source 1..42: mol_type = other DNA
acgacgctcttccgatctnnnnnnnnttacgatgaannnnnn

SEQ ID NO: 478 - DNA, 42 bp, synthetic construct
  source 1..42: mol_type = other DNA
acgacgctcttccgatctnnnnnnnnttgctggcatnnnnnn

SEQ ID NO: 479 - DNA, 42 bp, synthetic construct
  source 1..42: mol_type = other DNA
acgacgctcttccgatctnnnnnnnngaggcatcaannnnnn

SEQ ID NO: 480 - DNA, 42 bp, synthetic construct
  source 1..42: mol_type = other DNA
acgacgctcttccgatctnnnnnnnnattcgaccaannnnnn

SEQ ID NO: 481 - DNA, 42 bp, synthetic construct
  source 1..42: mol_type = other DNA
acgacgctcttccgatctnnnnnnnngccgtatgctnnnnnn

SEQ ID NO: 482 - DNA, 42 bp, synthetic construct
  source 1..42: mol_type = other DNA
acgacgctcttccgatctnnnnnnnnctgaactggtnnnnnn

SEQ ID NO: 483 - DNA, 42 bp, synthetic construct
  source 1..42: mol_type = other DNA
acgacgctcttccgatctnnnnnnnncataaccagcnnnnnn

SEQ ID NO: 484 - DNA, 42 bp, synthetic construct
  source 1..42: mol_type = other DNA
acgacgctcttccgatctnnnnnnnnaagttgccatnnnnnn

SEQ ID NO: 485 - DNA, 42 bp, synthetic construct
  source 1..42: mol_type = other DNA
acgacgctcttccgatctnnnnnnnnaggccgctcgnnnnnn

SEQ ID NO: 486 - DNA, 42 bp, synthetic construct
  source 1..42: mol_type = other DNA
acgacgctcttccgatctnnnnnnnnaggtaataggnnnnnn

SEQ ID NO: 487 - DNA, 42 bp, synthetic construct
  source 1..42: mol_type = other DNA
acgacgctcttccgatctnnnnnnnngtactagtaannnnnn

SEQ ID NO: 488 - DNA, 42 bp, synthetic construct
  source 1..42: mol_type = other DNA
acgacgctcttccgatctnnnnnnnngcgcggtagtnnnnnn

SEQ ID NO: 489 - DNA, 42 bp, synthetic construct
  source 1..42: mol_type = other DNA
acgacgctcttccgatctnnnnnnnnctggattagtnnnnnn

SEQ ID NO: 490 - DNA, 42 bp, synthetic construct
  source 1..42: mol_type = other DNA
acgacgctcttccgatctnnnnnnnnttggatccttnnnnnn

SEQ ID NO: 491 - DNA, 42 bp, synthetic construct
  source 1..42: mol_type = other DNA
acgacgctcttccgatctnnnnnnnnttggaatctcnnnnnn

SEQ ID NO: 492 - DNA, 42 bp, synthetic construct
  source 1..42: mol_type = other DNA
acgacgctcttccgatctnnnnnnnnacctggacgcnnnnnn

SEQ ID NO: 493 - DNA, 42 bp, synthetic construct
  source 1..42: mol_type = other DNA
acgacgctcttccgatctnnnnnnnncctgacgttcnnnnnn

SEQ ID NO: 494 - DNA, 42 bp, synthetic construct
  source 1..42: mol_type = other DNA
acgacgctcttccgatctnnnnnnnngcgttcagctnnnnnn

SEQ ID NO: 495 - DNA, 42 bp, synthetic construct
  source 1..42: mol_type = other DNA
acgacgctcttccgatctnnnnnnnnttagcaataannnnnn

SEQ ID NO: 496 - DNA, 42 bp, synthetic construct
  source 1..42: mol_type = other DNA
acgacgctcttccgatctnnnnnnnnttgatgctatnnnnnn

SEQ ID NO: 497 - DNA, 42 bp, synthetic construct
  source 1..42: mol_type = other DNA
acgacgctcttccgatctnnnnnnnnctctgcggcannnnnn

SEQ ID NO: 498 - DNA, 42 bp, synthetic construct
  source 1..42: mol_type = other DNA
acgacgctcttccgatctnnnnnnnnaataataccannnnnn

SEQ ID NO: 499 - DNA, 42 bp, synthetic construct
  source 1..42: mol_type = other DNA
acgacgctcttccgatctnnnnnnnnacgccgttcannnnnn

SEQ ID NO: 500 - DNA, 42 bp, synthetic construct
  source 1..42: mol_type = other DNA
acgacgctcttccgatctnnnnnnnnttcgcttacgnnnnnn

SEQ ID NO: 501 - DNA, 42 bp, synthetic construct
  source 1..42: mol_type = other DNA
acgacgctcttccgatctnnnnnnnntacggctacgnnnnnn

SEQ ID NO: 502 - DNA, 42 bp, synthetic construct
  source 1..42: mol_type = other DNA
acgacgctcttccgatctnnnnnnnnttcttatcgannnnnn

SEQ ID NO: 503 - DNA, 42 bp, synthetic construct
  source 1..42: mol_type = other DNA
acgacgctcttccgatctnnnnnnnnttccatggcannnnnn

SEQ ID NO: 504 - DNA, 42 bp, synthetic construct
  source 1..42: mol_type = other DNA
acgacgctcttccgatctnnnnnnnnaagtagtcagnnnnnn

SEQ ID NO: 505 - DNA, 42 bp, synthetic construct
  source 1..42: mol_type = other DNA
acgacgctcttccgatctnnnnnnnntcagctctaannnnnn

SEQ ID NO: 506 - DNA, 42 bp, synthetic construct
  source 1..42: mol_type = other DNA
acgacgctcttccgatctnnnnnnnncgaatagatgnnnnnn

SEQ ID NO: 507 - DNA, 42 bp, synthetic construct
  source 1..42: mol_type = other DNA
acgacgctcttccgatctnnnnnnnncggagatccgnnnnnn

SEQ ID NO: 508 - DNA, 42 bp, synthetic construct
  source 1..42: mol_type = other DNA
acgacgctcttccgatctnnnnnnnnaccgcagaatnnnnnn

SEQ ID NO: 509 - DNA, 42 bp, synthetic construct
  source 1..42: mol_type = other DNA
acgacgctcttccgatctnnnnnnnntctcctataannnnnn

SEQ ID NO: 510 - DNA, 42 bp, synthetic construct
  source 1..42: mol_type = other DNA
acgacgctcttccgatctnnnnnnnncaacctatatnnnnnn

SEQ ID NO: 511 - DNA, 42 bp, synthetic construct
  source 1..42: mol_type = other DNA
acgacgctcttccgatctnnnnnnnnagtcgagaagnnnnnn

SEQ ID NO: 512 - DNA, 42 bp, synthetic construct
  source 1..42: mol_type = other DNA
acgacgctcttccgatctnnnnnnnnaagacggccannnnnn

SEQ ID NO: 513 - DNA, 42 bp, synthetic construct
  source 1..42: mol_type = other DNA
acgacgctcttccgatctnnnnnnnngccaacgccannnnnn

SEQ ID NO: 514 - DNA, 42 bp, synthetic construct
  source 1..42: mol_type = other DNA
acgacgctcttccgatctnnnnnnnntctaccattannnnnn

SEQ ID NO: 515 - DNA, 42 bp, synthetic construct
  source 1..42: mol_type = other DNA
acgacgctcttccgatctnnnnnnnncttgcggtctnnnnnn

SEQ ID NO: 516 - DNA, 42 bp, synthetic construct
  source 1..42: mol_type = other DNA
acgacgctcttccgatctnnnnnnnnttacgtatacnnnnnn

SEQ ID NO: 517 - DNA, 42 bp, synthetic construct
  source 1..42: mol_type = other DNA
acgacgctcttccgatctnnnnnnnncgattggttannnnnn

SEQ ID NO: 518 - DNA, 42 bp, synthetic construct
  source 1..42: mol_type = other DNA
acgacgctcttccgatctnnnnnnnnacttaactagnnnnnn

SEQ ID NO: 519 - DNA, 42 bp, synthetic construct
  source 1..42: mol_type = other DNA
acgacgctcttccgatctnnnnnnnngcagaccggtnnnnnn

SEQ ID NO: 520 - DNA, 42 bp, synthetic construct
  source 1..42: mol_type = other DNA
acgacgctcttccgatctnnnnnnnntgagtccagannnnnn

SEQ ID NO: 521 - DNA, 42 bp, synthetic construct
  source 1..42: mol_type = other DNA
acgacgctcttccgatctnnnnnnnntggagaattcnnnnnn

SEQ ID NO: 522 - DNA, 42 bp, synthetic construct
  source 1..42: mol_type = other DNA
acgacgctcttccgatctnnnnnnnnaccagccttannnnnn

SEQ ID NO: 523 - DNA, 42 bp, synthetic construct
  source 1..42: mol_type = other DNA
acgacgctcttccgatctnnnnnnnnggcgagcttannnnnn

SEQ ID NO: 524 - DNA, 42 bp, synthetic construct
  source 1..42: mol_type = other DNA
acgacgctcttccgatctnnnnnnnntcgaggagtannnnnn

SEQ ID NO: 525 - DNA, 42 bp, synthetic construct
  source 1..42: mol_type = other DNA
acgacgctcttccgatctnnnnnnnnccttactcctnnnnnn

SEQ ID NO: 526 - DNA, 42 bp, synthetic construct
  source 1..42: mol_type = other DNA
acgacgctcttccgatctnnnnnnnntcagacgaacnnnnnn

SEQ ID NO: 527 - DNA, 42 bp, synthetic construct
  source 1..42: mol_type = other DNA
acgacgctcttccgatctnnnnnnnnccgtccagtannnnnn

SEQ ID NO: 528 - DNA, 42 bp, synthetic construct
  source 1..42: mol_type = other DNA
acgacgctcttccgatctnnnnnnnngttccgctaannnnnn

SEQ ID NO: 529 - DNA, 42 bp, synthetic construct
  source 1..42: mol_type = other DNA
acgacgctcttccgatctnnnnnnnncagattcgatnnnnnn

SEQ ID NO: 530 - DNA, 42 bp, synthetic construct
  source 1..42: mol_type = other DNA
acgacgctcttccgatctnnnnnnnntgcatataacnnnnnn

SEQ ID NO: 531 - DNA, 42 bp, synthetic construct
  source 1..42: mol_type = other DNA
acgacgctcttccgatctnnnnnnnntaggcagatannnnnn

SEQ ID NO: 532 - DNA, 42 bp, synthetic construct
  source 1..42: mol_type = other DNA
acgacgctcttccgatctnnnnnnnntatgccgagtnnnnnn

SEQ ID NO: 533 - DNA, 42 bp, synthetic construct
  source 1..42: mol_type = other DNA
acgacgctcttccgatctnnnnnnnnatagtcgtagnnnnnn

SEQ ID NO: 534 - DNA, 42 bp, synthetic construct
  source 1..42: mol_type = other DNA
acgacgctcttccgatctnnnnnnnnggatgcagcannnnnn

SEQ ID NO: 535 - DNA, 42 bp, synthetic construct
  source 1..42: mol_type = other DNA
acgacgctcttccgatctnnnnnnnnccgctatattnnnnnn

SEQ ID NO: 536 - DNA, 42 bp, synthetic construct
  source 1..42: mol_type = other DNA
acgacgctcttccgatctnnnnnnnnatcgagtcgcnnnnnn

SEQ ID NO: 537 - DNA, 42 bp, synthetic construct
  source 1..42: mol_type = other DNA
acgacgctcttccgatctnnnnnnnngcgacgcagannnnnn

SEQ ID NO: 538 - DNA, 42 bp, synthetic construct
  source 1..42: mol_type = other DNA
acgacgctcttccgatctnnnnnnnnaatggtcgacnnnnnn

SEQ ID NO: 539 - DNA, 42 bp, synthetic construct
  source 1..42: mol_type = other DNA
acgacgctcttccgatctnnnnnnnntggaactagannnnnn

SEQ ID NO: 540 - DNA, 42 bp, synthetic construct
  source 1..42: mol_type = other DNA
acgacgctcttccgatctnnnnnnnngtccaactcannnnnn

SEQ ID NO: 541 - DNA, 42 bp, synthetic construct
  source 1..42: mol_type = other DNA
acgacgctcttccgatctnnnnnnnngttatggatcnnnnnn

SEQ ID NO: 542 - DNA, 42 bp, synthetic construct
  source 1..42: mol_type = other DNA
acgacgctcttccgatctnnnnnnnnttataagaacnnnnnn

SEQ ID NO: 543 - DNA, 42 bp, synthetic construct
  source 1..42: mol_type = other DNA
acgacgctcttccgatctnnnnnnnncaagcttcatnnnnnn

SEQ ID NO: 544 - DNA, 42 bp, synthetic construct
  source 1..42: mol_type = other DNA
acgacgctcttccgatctnnnnnnnnctgattaagannnnnn

SEQ ID NO: 545 - DNA, 42 bp, synthetic construct
  source 1..42: mol_type = other DNA
acgacgctcttccgatctnnnnnnnntacttacttannnnnn

SEQ ID NO: 546 - DNA, 42 bp, synthetic construct
  source 1..42: mol_type = other DNA
acgacgctcttccgatctnnnnnnnnggatctgcagnnnnnn

SEQ ID NO: 547 - DNA, 42 bp, synthetic construct
  source 1..42: mol_type = other DNA
acgacgctcttccgatctnnnnnnnnatgcaatatgnnnnnn

SEQ ID NO: 548 - DNA, 42 bp, synthetic construct
  source 1..42: mol_type = other DNA
acgacgctcttccgatctnnnnnnnnttcctagaccnnnnnn

SEQ ID NO: 549 - DNA, 42 bp, synthetic construct
  source 1..42: mol_type = other DNA
acgacgctcttccgatctnnnnnnnnactgccgatannnnnn

SEQ ID NO: 550 - DNA, 42 bp, synthetic construct
  source 1..42: mol_type = other DNA
acgacgctcttccgatctnnnnnnnntccagaaggtnnnnnn

SEQ ID NO: 551 - DNA, 42 bp, synthetic construct
  source 1..42: mol_type = other DNA
acgacgctcttccgatctnnnnnnnnttcaagaccannnnnn

SEQ ID NO: 552 - DNA, 42 bp, synthetic construct
  source 1..42: mol_type = other DNA
acgacgctcttccgatctnnnnnnnntattactcatnnnnnn

SEQ ID NO: 553 - DNA, 42 bp, synthetic construct
  source 1..42: mol_type = other DNA
acgacgctcttccgatctnnnnnnnnaactgatcttnnnnnn

SEQ ID NO: 554 - DNA, 42 bp, synthetic construct
  source 1..42: mol_type = other DNA
acgacgctcttccgatctnnnnnnnnccgcggaccgnnnnnn

SEQ ID NO: 555 - DNA, 42 bp, synthetic construct
  source 1..42: mol_type = other DNA
acgacgctcttccgatctnnnnnnnnaatacgcaggnnnnnn

SEQ ID NO: 556 - DNA, 42 bp, synthetic construct
  source 1..42: mol_type = other DNA
acgacgctcttccgatctnnnnnnnnggtcgcgtcannnnnn

SEQ ID NO: 557 - DNA, 42 bp, synthetic construct
  source 1..42: mol_type = other DNA
acgacgctcttccgatctnnnnnnnnaattatcagcnnnnnn

SEQ ID NO: 558 - DNA, 42 bp, synthetic construct
  source 1..42: mol_type = other DNA
acgacgctcttccgatctnnnnnnnncagctatcgtnnnnnn

SEQ ID NO: 559 - DNA, 42 bp, synthetic construct
  source 1..42: mol_type = other DNA
acgacgctcttccgatctnnnnnnnnattgcgctgannnnnn

SEQ ID NO: 560 - DNA, 42 bp, synthetic construct
  source 1..42: mol_type = other DNA
acgacgctcttccgatctnnnnnnnnttggtaggcgnnnnnn

SEQ ID NO: 561 - DNA, 42 bp, synthetic construct
  source 1..42: mol_type = other DNA
acgacgctcttccgatctnnnnnnnnagctaaggtannnnnn

SEQ ID NO: 562 - DNA, 42 bp, synthetic construct
  source 1..42: mol_type = other DNA
acgacgctcttccgatctnnnnnnnntcgtagagaannnnnn

SEQ ID NO: 563 - DNA, 42 bp, synthetic construct
  source 1..42: mol_type = other DNA
acgacgctcttccgatctnnnnnnnntgatggccttnnnnnn

SEQ ID NO: 564 - DNA, 42 bp, synthetic construct
  source 1..42: mol_type = other DNA
acgacgctcttccgatctnnnnnnnntggaagtaccnnnnnn

SEQ ID NO: 565 - DNA, 42 bp, synthetic construct
  source 1..42: mol_type = other DNA
acgacgctcttccgatctnnnnnnnnctccaaggatnnnnnn

SEQ ID NO: 566 - DNA, 42 bp, synthetic construct
  source 1..42: mol_type = other DNA
acgacgctcttccgatctnnnnnnnnagatatatcgnnnnnn

SEQ ID NO: 567 - DNA, 42 bp, synthetic construct
  source 1..42: mol_type = other DNA
acgacgctcttccgatctnnnnnnnncatgctggttnnnnnn

SEQ ID NO: 568 - DNA, 42 bp, synthetic construct
  source 1..42: mol_type = other DNA
acgacgctcttccgatctnnnnnnnntcctcgagtcnnnnnn

SEQ ID NO: 569 - DNA, 42 bp, synthetic construct
  source 1..42: mol_type = other DNA
acgacgctcttccgatctnnnnnnnngcaaggaatannnnnn

SEQ ID NO: 570 - DNA, 42 bp, synthetic construct
  source 1..42: mol_type = other DNA
acgacgctcttccgatctnnnnnnnnggcatagcttnnnnnn

SEQ ID NO: 571 - DNA, 42 bp, synthetic construct
  source 1..42: mol_type = other DNA
acgacgctcttccgatctnnnnnnnnctacggtagcnnnnnn

SEQ ID NO: 572 - DNA, 42 bp, synthetic construct
  source 1..42: mol_type = other DNA
acgacgctcttccgatctnnnnnnnnagtaagcatannnnnn

SEQ ID NO: 573 - DNA, 42 bp, synthetic construct
  source 1..42: mol_type = other DNA
acgacgctcttccgatctnnnnnnnncgcctcgaacnnnnnn

SEQ ID NO: 574 - DNA, 42 bp, synthetic construct
  source 1..42: mol_type = other DNA
acgacgctcttccgatctnnnnnnnnttaggatctannnnnn

SEQ ID NO: 575 - DNA, 42 bp, synthetic construct
  source 1..42: mol_type = other DNA
acgacgctcttccgatctnnnnnnnnactactgaagnnnnnn

SEQ ID NO: 576 - DNA, 42 bp, synthetic construct
  source 1..42: mol_type = other DNA
acgacgctcttccgatctnnnnnnnnaatctggagtnnnnnn

SEQ ID NO: 577 - DNA, 10 bp, synthetic construct
  source 1..10: mol_type = other DNA
cggtcaagaa

SEQ ID NO: 578 - DNA, 10 bp, synthetic construct
  source 1..10: mol_type = other DNA
cgctcctaac

SEQ ID NO: 579 - DNA, 10 bp, synthetic construct
  source 1..10: mol_type = other DNA
atccatgact

SEQ ID NO: 580 - DNA, 10 bp, synthetic construct
  source 1..10: mol_type = other DNA
aacctggtct

SEQ ID NO: 581 - DNA, 10 bp, synthetic construct
  source 1..10: mol_type = other DNA
accgaagacc

SEQ ID NO: 582 - DNA, 10 bp, synthetic construct
  source 1..10: mol_type = other DNA
ggtaccggca

SEQ ID NO: 583 - DNA, 10 bp, synthetic construct
  source 1..10: mol_type = other DNA
aagccagtta

SEQ ID NO: 584 - DNA, 10 bp, synthetic construct
  source 1..10: mol_type = other DNA
tcttgccgac

SEQ ID NO: 585 - DNA, 10 bp, synthetic construct
  source 1..10: mol_type = other DNA
aagaccgttg

SEQ ID NO: 586 - DNA, 10 bp, synthetic construct
  source 1..10: mol_type = other DNA
aggttagcat

SEQ ID NO: 587 - DNA, 10 bp, synthetic construct
  source 1..10: mol_type = other DNA
ttcgcctcca

SEQ ID NO: 588 - DNA, 10 bp, synthetic construct
  source 1..10: mol_type = other DNA
agagccaagg

SEQ ID NO: 589 - DNA, 10 bp, synthetic construct
  source 1..10: mol_type = other DNA
aataccatcc

SEQ ID NO: 590 - DNA, 10 bp, synthetic construct
  source 1..10: mol_type = other DNA
agctctcctc

SEQ ID NO: 591 - DNA, 10 bp, synthetic construct
  source 1..10: mol_type = other DNA
cttgattgcc

SEQ ID NO: 592 - DNA, 10 bp, synthetic construct
  source 1..10: mol_type = other DNA
agcttatccg

SEQ ID NO: 593 - DNA, 10 bp, synthetic construct
  source 1..10: mol_type = other DNA
aagaatctga

SEQ ID NO: 594 - DNA, 10 bp, synthetic construct
  source 1..10: mol_type = other DNA
catctctgca

SEQ ID NO: 595 - DNA, 10 bp, synthetic construct
  source 1..10: mol_type = other DNA
acctggccaa

SEQ ID NO: 596 - DNA, 10 bp, synthetic construct
  source 1..10: mol_type = other DNA
taactggtta

SEQ ID NO: 597 - DNA, 10 bp, synthetic construct
  source 1..10: mol_type = other DNA
ttgctaacgg

SEQ ID NO: 598 - DNA, 10 bp, synthetic construct
  source 1..10: mol_type = other DNA
actagagagt

SEQ ID NO: 599 - DNA, 10 bp, synthetic construct
  source 1..10: mol_type = other DNA
aatgccgctt

SEQ ID NO: 600 - DNA, 10 bp, synthetic construct
  source 1..10: mol_type = other DNA
tatagacgca

SEQ ID NO: 601 - DNA, 10 bp, synthetic construct
  source 1..10: mol_type = other DNA
tcaatcgcat

SEQ ID NO: 602 - DNA, 10 bp, synthetic construct
  source 1..10: mol_type = other DNA
ttcttaataa

SEQ ID NO: 603 - DNA, 10 bp, synthetic construct
  source 1..10: mol_type = other DNA
gtcctagagg

SEQ ID NO: 604 - DNA, 10 bp, synthetic construct
  source 1..10: mol_type = other DNA
atattgatac

SEQ ID NO: 605 - DNA, 10 bp, synthetic construct
  source 1..10: mol_type = other DNA
ccgctgccag

SEQ ID NO: 606 - DNA, 10 bp, synthetic construct
  source 1..10: mol_type = other DNA
cctagtacgt

SEQ ID NO: 607 - DNA, 10 bp, synthetic construct
  source 1..10: mol_type = other DNA
caattaccgt

SEQ ID NO: 608 - DNA, 10 bp, synthetic construct
  source 1..10: mol_type = other DNA
ggccgtagtc

SEQ ID NO: 609 - DNA, 10 bp, synthetic construct
  source 1..10: mol_type = other DNA
cgattacggc

SEQ ID NO: 610 - DNA, 10 bp, synthetic construct
  source 1..10: mol_type = other DNA
taatgaacga

SEQ ID NO: 611 - DNA, 10 bp, synthetic construct
  source 1..10: mol_type = other DNA
ccgttcctta

SEQ ID NO: 612 - DNA, 10 bp, synthetic construct
  source 1..10: mol_type = other DNA
ggtaccatat

SEQ ID NO: 613 - DNA, 10 bp, synthetic construct
  source 1..10: mol_type = other DNA
ccgattcgca

SEQ ID NO: 614 - DNA, 10 bp, synthetic construct
  source 1..10: mol_type = other DNA
atggctctgc

SEQ ID NO: 615 - DNA, 10 bp, synthetic construct
  source 1..10: mol_type = other DNA
gtataatacg

SEQ ID NO: 616 - DNA, 10 bp, synthetic construct
  source 1..10: mol_type = other DNA
atcagcaagt

SEQ ID NO: 617 - DNA, 10 bp, synthetic construct
  source 1..10: mol_type = other DNA
ggcgaactcg

SEQ ID NO: 618 - DNA, 10 bp, synthetic construct
  source 1..10: mol_type = other DNA
ttaattgaat

SEQ ID NO: 619 - DNA, 10 bp, synthetic construct
  source 1..10: mol_type = other DNA
ttaggaccgg

SEQ ID NO: 620 - DNA, 10 bp, synthetic construct
  source 1..10: mol_type = other DNA
aagtaagagc

SEQ ID NO: 621 - DNA, 10 bp, synthetic construct
  source 1..10: mol_type = other DNA
ccttggtcca

SEQ ID NO: 622 - DNA, 10 bp, synthetic construct
  source 1..10: mol_type = other DNA
catcagaatg

SEQ ID NO: 623 - DNA, 10 bp, synthetic construct
  source 1..10: mol_type = other DNA
ttatagcaga

SEQ ID NO: 624 - DNA, 10 bp, synthetic construct
  source 1..10: mol_type = other DNA
ttacttggaa

SEQ ID NO: 625 - DNA, 10 bp, synthetic construct
  source 1..10: mol_type = other DNA
gctcagccgg

SEQ ID NO: 626 - DNA, 10 bp, synthetic construct
  source 1..10: mol_type = other DNA
acgtccgcag

SEQ ID NO: 627 - DNA, 10 bp, synthetic construct
  source 1..10: mol_type = other DNA
ttgactgacg

SEQ ID NO: 628 - DNA, 10 bp, synthetic construct
  source 1..10: mol_type = other DNA
ttgcgaggca

SEQ ID NO: 629 - DNA, 10 bp, synthetic construct
  source 1..10: mol_type = other DNA
ttccaaccgc

SEQ ID NO: 630 - DNA, 10 bp, synthetic construct
  source 1..10: mol_type = other DNA
taaccttcgg

SEQ ID NO: 631 - DNA, 10 bp, synthetic construct
  source 1..10: mol_type = other DNA
tcaagccgat

SEQ ID NO: 632 - DNA, 10 bp, synthetic construct
  source 1..10: mol_type = other DNA
cttgcaacct

SEQ ID NO: 633 - DNA, 10 bp, synthetic construct
  source 1..10: mol_type = other DNA
ccatcgcgaa

SEQ ID NO: 634 - DNA, 10 bp, synthetic construct
  source 1..10: mol_type = other DNA
tagacttctt

SEQ ID NO: 635 - DNA, 10 bp, synthetic construct
  source 1..10: mol_type = other DNA
gtccttaaga

SEQ ID NO: 636 - DNA, 10 bp, synthetic construct
  source 1..10: mol_type = other DNA
agtaacggtc

SEQ ID NO: 637 - DNA, 10 bp, synthetic construct
  source 1..10: mol_type = other DNA
gttcgtcaga

SEQ ID NO: 638 - DNA, 10 bp, synthetic construct
  source 1..10: mol_type = other DNA
cgcctaatgc

SEQ ID NO: 639 - DNA, 10 bp, synthetic construct
  source 1..10: mol_type = other DNA
accggaatta

SEQ ID NO: 640 - DNA, 10 bp, synthetic construct
  source 1..10: mol_type = other DNA
taggccatag

SEQ ID NO: 641 - DNA, 10 bp, synthetic construct
  source 1..10: mol_type = other DNA
taactcttag

SEQ ID NO: 642 - DNA, 10 bp, synthetic construct
  source 1..10: mol_type = other DNA
tatgagttaa

SEQ ID NO: 643 - DNA, 10 bp, synthetic construct
  source 1..10: mol_type = other DNA
tatcatgatc

SEQ ID NO: 644 - DNA, 10 bp, synthetic construct
  source 1..10: mol_type = other DNA
gagcatatgg

SEQ ID NO: 645 - DNA, 10 bp, synthetic construct
  source 1..10: mol_type = other DNA
taacgatcca

SEQ ID NO: 646 - DNA, 10 bp, synthetic construct
  source 1..10: mol_type = other DNA
cggcgtaact

SEQ ID NO: 647 - DNA, 10 bp, synthetic construct
  source 1..10: mol_type = other DNA
cgtcgcagcc

SEQ ID NO: 648 - DNA, 10 bp, synthetic construct
  source 1..10: mol_type = other DNA
gtagctccat

SEQ ID NO: 649 - DNA, 10 bp, synthetic construct
  source 1..10: mol_type = other DNA
ttgccttggc

SEQ ID NO: 650 - DNA, 10 bp, synthetic construct
  source 1..10: mol_type = other DNA
tgctaattct

SEQ ID NO: 651 - DNA, 10 bp, synthetic construct
  source 1..10: mol_type = other DNA
gtcctacttg

SEQ ID NO: 652 - DNA, 10 bp, synthetic construct
  source 1..10: mol_type = other DNA
ggtaggttag

SEQ ID NO: 653 - DNA, 10 bp, synthetic construct
  source 1..10: mol_type = other DNA
gagcatcatt

SEQ ID NO: 654 - DNA, 10 bp, synthetic construct
  source 1..10: mol_type = other DNA
ccgctccggc

SEQ ID NO: 655 - DNA, 10 bp, synthetic construct
  source 1..10: mol_type = other DNA
ttcttccggt

SEQ ID NO: 656 - DNA, 10 bp, synthetic construct
  source 1..10: mol_type = other DNA
aggagagaac

SEQ ID NO: 657 - DNA, 10 bp, synthetic construct
  source 1..10: mol_type = other DNA
taactcaatt

SEQ ID NO: 658 - DNA, 10 bp, synthetic construct
  source 1..10: mol_type = other DNA
actataggtt

SEQ ID NO: 659 - DNA, 10 bp, synthetic construct
  source 1..10: mol_type = other DNA
caagatgccg

SEQ ID NO: 660 - DNA, 10 bp, synthetic construct
  source 1..10: mol_type = other DNA
aacgtctagt

SEQ ID NO: 661 - DNA, 10 bp, synthetic construct
  source 1..10: mol_type = other DNA
aggtatactc

SEQ ID NO: 662 - DNA, 10 bp, synthetic construct
  source 1..10: mol_type = other DNA
ttcataggac

SEQ ID NO: 663 - DNA, 10 bp, synthetic construct
  source 1..10: mol_type = other DNA
ggaggcctcc

SEQ ID NO: 664 - DNA, 10 bp, synthetic construct
  source 1..10: mol_type = other DNA
ttcaatataa

SEQ ID NO: 665 - DNA, 10 bp, synthetic construct
  source 1..10: mol_type = other DNA
acgtcatata

SEQ ID NO: 666 - DNA, 10 bp, synthetic construct
  source 1..10: mol_type = other DNA
ttgaccagga

SEQ ID NO: 667 - DNA, 10 bp, synthetic construct
  source 1..10: mol_type = other DNA
cggttgcgcg

SEQ ID NO: 668 - DNA, 10 bp, synthetic construct
  source 1..10: mol_type = other DNA
caaggaggtc

SEQ ID NO: 669 - DNA, 10 bp, synthetic construct
  source 1..10: mol_type = other DNA
ttacgatgaa

SEQ ID NO: 670 - DNA, 10 bp, synthetic construct
  source 1..10: mol_type = other DNA
ttgctggcat

SEQ ID NO: 671 - DNA, 10 bp, synthetic construct
  source 1..10: mol_type = other DNA
gaggcatcaa

SEQ ID NO: 672 - DNA, 10 bp, synthetic construct
  source 1..10: mol_type = other DNA
attcgaccaa

SEQ ID NO: 673 - DNA, 10 bp, synthetic construct
  source 1..10: mol_type = other DNA
gccgtatgct

SEQ ID NO: 674 - DNA, 10 bp, synthetic construct
  source 1..10: mol_type = other DNA
ctgaactggt

SEQ ID NO: 675 - DNA, 10 bp, synthetic construct
  source 1..10: mol_type = other DNA
cataaccagc

SEQ ID NO: 676 - DNA, 10 bp, synthetic construct
  source 1..10: mol_type = other DNA
aagttgccat

SEQ ID NO: 677 - DNA, 10 bp, synthetic construct
  source 1..10: mol_type = other DNA
aggccgctcg

SEQ ID NO: 678 - DNA, 10 bp, synthetic construct
  source 1..10: mol_type = other DNA
aggtaatagg

SEQ ID NO: 679 - DNA, 10 bp, synthetic construct
  source 1..10: mol_type = other DNA
gtactagtaa

SEQ ID NO: 680 - DNA, 10 bp, synthetic construct
  source 1..10: mol_type = other DNA
gcgcggtagt

SEQ ID NO: 681 - DNA, 10 bp, synthetic construct
  source 1..10: mol_type = other DNA
ctggattagt

SEQ ID NO: 682 - DNA, 10 bp, synthetic construct
  source 1..10: mol_type = other DNA
ttggatcctt

SEQ ID NO: 683 - DNA, 10 bp, synthetic construct
  source 1..10: mol_type = other DNA
ttggaatctc

SEQ ID NO: 684 - DNA, 10 bp, synthetic construct
  source 1..10: mol_type = other DNA
acctggacgc

SEQ ID NO: 685 - DNA, 10 bp, synthetic construct
  source 1..10: mol_type = other DNA
cctgacgttc

SEQ ID NO: 686 - DNA, 10 bp, synthetic construct
  source 1..10: mol_type = other DNA
gcgttcagct

SEQ ID NO: 687 - DNA, 10 bp, synthetic construct
  source 1..10: mol_type = other DNA
ttagcaataa

SEQ ID NO: 688 - DNA, 10 bp, synthetic construct
  source 1..10: mol_type = other DNA
ttgatgctat

SEQ ID NO: 689 - DNA, 10 bp, synthetic construct
  source 1..10: mol_type = other DNA
ctctgcggca

SEQ ID NO: 690 - DNA, 10 bp, synthetic construct
  source 1..10: mol_type = other DNA
aataatacca

SEQ ID NO: 691 - DNA, 10 bp, synthetic construct
  source 1..10: mol_type = other DNA
acgccgttca

SEQ ID NO: 692 - DNA, 10 bp, synthetic construct
  source 1..10: mol_type = other DNA
ttcgcttacg

SEQ ID NO: 693 - DNA, 10 bp, synthetic construct
  source 1..10: mol_type = other DNA
tacggctacg

SEQ ID NO: 694 - DNA, 10 bp, synthetic construct
  source 1..10: mol_type = other DNA
ttcttatcga

SEQ ID NO: 695 - DNA, 10 bp, synthetic construct
  source 1..10: mol_type = other DNA
ttccatggca

SEQ ID NO: 696 - DNA, 10 bp, synthetic construct
  source 1..10: mol_type = other DNA
aagtagtcag

SEQ ID NO: 697 - DNA, 10 bp, synthetic construct
  source 1..10: mol_type = other DNA
tcagctctaa

SEQ ID NO: 698 - DNA, 10 bp, synthetic construct
  source 1..10: mol_type = other DNA
cgaatagatg

SEQ ID NO: 699 - DNA, 10 bp, synthetic construct
  source 1..10: mol_type = other DNA
cggagatccg

SEQ ID NO: 700 - DNA, 10 bp, synthetic construct
  source 1..10: mol_type = other DNA
accgcagaat

SEQ ID NO: 701 - DNA, 10 bp, synthetic construct
  source 1..10: mol_type = other DNA
tctcctataa

SEQ ID NO: 702 - DNA, 10 bp, synthetic construct
  source 1..10: mol_type = other DNA
caacctatat

SEQ ID NO: 703 - DNA, 10 bp, synthetic construct
  source 1..10: mol_type = other DNA
agtcgagaag

SEQ ID NO: 704 - DNA, 10 bp, synthetic construct
  source 1..10: mol_type = other DNA
aagacggcca

SEQ ID NO: 705 - DNA, 10 bp, synthetic construct
  source 1..10: mol_type = other DNA
gccaacgcca

SEQ ID NO: 706 - DNA, 10 bp, synthetic construct
  source 1..10: mol_type = other DNA
tctaccatta

SEQ ID NO: 707 - DNA, 10 bp, synthetic construct
  source 1..10: mol_type = other DNA
cttgcggtct

SEQ ID NO: 708 - DNA, 10 bp, synthetic construct
  source 1..10: mol_type = other DNA
ttacgtatac

SEQ ID NO: 709 - DNA, 10 bp, synthetic construct
  source 1..10: mol_type = other DNA
cgattggtta

SEQ ID NO: 710 - DNA, 10 bp, synthetic construct
  source 1..10: mol_type = other DNA
acttaactag

SEQ ID NO: 711 - DNA, 10 bp, synthetic construct
  source 1..10: mol_type = other DNA
gcagaccggt

SEQ ID NO: 712 - DNA, 10 bp, synthetic construct
  source 1..10: mol_type = other DNA
tgagtccaga

SEQ ID NO: 713 - DNA, 10 bp, synthetic construct
  source 1..10: mol_type = other DNA
tggagaattc

SEQ ID NO: 714 - DNA, 10 bp, synthetic construct
  source 1..10: mol_type = other DNA
accagcctta

SEQ ID NO: 715 - DNA, 10 bp, synthetic construct
  source 1..10: mol_type = other DNA
ggcgagctta

SEQ ID NO: 716 - DNA, 10 bp, synthetic construct
  source 1..10: mol_type = other DNA
tcgaggagta

SEQ ID NO: 717 - DNA, 10 bp, synthetic construct
  source 1..10: mol_type = other DNA
ccttactcct

SEQ ID NO: 718 - DNA, 10 bp, synthetic construct
  source 1..10: mol_type = other DNA
tcagacgaac

SEQ ID NO: 719 - DNA, 10 bp, synthetic construct
  source 1..10: mol_type = other DNA
ccgtccagta

SEQ ID NO: 720 - DNA, 10 bp, synthetic construct
  source 1..10: mol_type = other DNA
gttccgctaa

SEQ ID NO: 721 - DNA, 10 bp, synthetic construct
  source 1..10: mol_type = other DNA
cagattcgat

SEQ ID NO: 722 - DNA, 10 bp, synthetic construct
  source 1..10: mol_type = other DNA
tgcatataac

SEQ ID NO: 723 - DNA, 10 bp, synthetic construct
  source 1..10: mol_type = other DNA
taggcagata

SEQ ID NO: 724 - DNA, 10 bp, synthetic construct
  source 1..10: mol_type = other DNA
tatgccgagt

SEQ ID NO: 725 - DNA, 10 bp, synthetic construct
  source 1..10: mol_type = other DNA
atagtcgtag

SEQ ID NO: 726 - DNA, 10 bp, synthetic construct
  source 1..10: mol_type = other DNA
ggatgcagca

SEQ ID NO: 727 - DNA, 10 bp, synthetic construct
  source 1..10: mol_type = other DNA
ccgctatatt

SEQ ID NO: 728 - DNA, 10 bp, synthetic construct
  source 1..10: mol_type = other DNA
atcgagtcgc

SEQ ID NO: 729 - DNA, 10 bp, synthetic construct
  source 1..10: mol_type = other DNA
gcgacgcaga

SEQ ID NO: 730 - DNA, 10 bp, synthetic construct
  source 1..10: mol_type = other DNA
aatggtcgac

SEQ ID NO: 731 - DNA, 10 bp, synthetic construct
  source 1..10: mol_type = other DNA
tggaactaga

SEQ ID NO: 732 - DNA, 10 bp, synthetic construct
  source 1..10: mol_type = other DNA
gtccaactca

SEQ ID NO: 733 - DNA, 10 bp, synthetic construct
  source 1..10: mol_type = other DNA
gttatggatc

SEQ ID NO: 734 - DNA, 10 bp, synthetic construct
  source 1..10: mol_type = other DNA
ttataagaac

SEQ ID NO: 735 - DNA, 10 bp, synthetic construct
  source 1..10: mol_type = other DNA
caagcttcat

SEQ ID NO: 736 - DNA, 10 bp, synthetic construct
  source 1..10: mol_type = other DNA
ctgattaaga

SEQ ID NO: 737 - DNA, 10 bp, synthetic construct
  source 1..10: mol_type = other DNA
tacttactta

SEQ ID NO: 738 - DNA, 10 bp, synthetic construct
  source 1..10: mol_type = other DNA
ggatctgcag

SEQ ID NO: 739 - DNA, 10 bp, synthetic construct
  source 1..10: mol_type = other DNA
atgcaatatg

SEQ ID NO: 740 - DNA, 10 bp, synthetic construct
  source 1..10: mol_type = other DNA
ttcctagacc

SEQ ID NO: 741 - DNA, 10 bp, synthetic construct
  source 1..10: mol_type = other DNA
actgccgata

SEQ ID NO: 742 - DNA, 10 bp, synthetic construct
  source 1..10: mol_type = other DNA
tccagaaggt

SEQ ID NO: 743 - DNA, 10 bp, synthetic construct
  source 1..10: mol_type = other DNA
ttcaagacca

SEQ ID NO: 744 - DNA, 10 bp, synthetic construct
  source 1..10: mol_type = other DNA
tattactcat

SEQ ID NO: 745 - DNA, 10 bp, synthetic construct
  source 1..10: mol_type = other DNA
aactgatctt

SEQ ID NO: 746 - DNA, 10 bp, synthetic construct
  source 1..10: mol_type = other DNA
ccgcggaccg

SEQ ID NO: 747 - DNA, 10 bp, synthetic construct
  source 1..10: mol_type = other DNA
aatacgcagg

SEQ ID NO: 748 - DNA, 10 bp, synthetic construct
  source 1..10: mol_type = other DNA
ggtcgcgtca

SEQ ID NO: 749 - DNA, 10 bp, synthetic construct
  source 1..10: mol_type = other DNA
aattatcagc

SEQ ID NO: 750 - DNA, 10 bp, synthetic construct
  source 1..10: mol_type = other DNA
cagctatcgt

SEQ ID NO: 751 - DNA, 10 bp, synthetic construct
  source 1..10: mol_type = other DNA
attgcgctga

SEQ ID NO: 752 - DNA, 10 bp, synthetic construct
  source 1..10: mol_type = other DNA
ttggtaggcg

SEQ ID NO: 753 - DNA, 10 bp, synthetic construct
  source 1..10: mol_type = other DNA
agctaaggta

SEQ ID NO: 754 - DNA, 10 bp, synthetic construct
  source 1..10: mol_type = other DNA
tcgtagagaa

SEQ ID NO: 755 - DNA, 10 bp, synthetic construct
  source 1..10: mol_type = other DNA
tgatggcctt

SEQ ID NO: 756 - DNA, 10 bp, synthetic construct
  source 1..10: mol_type = other DNA
tggaagtacc

SEQ ID NO: 757 - DNA, 10 bp, synthetic construct
  source 1..10: mol_type = other DNA
ctccaaggat

SEQ ID NO: 758 - DNA, 10 bp, synthetic construct
  source 1..10: mol_type = other DNA
agatatatcg

SEQ ID NO: 759 - DNA, 10 bp, synthetic construct
  source 1..10: mol_type = other DNA
catgctggtt

SEQ ID NO: 760 - DNA, 10 bp, synthetic construct
  source 1..10: mol_type = other DNA
tcctcgagtc

SEQ ID NO: 761 - DNA, 10 bp, synthetic construct
  source 1..10: mol_type = other DNA
gcaaggaata

SEQ ID NO: 762 - DNA, 10 bp, synthetic construct
  source 1..10: mol_type = other DNA
ggcatagctt

SEQ ID NO: 763 - DNA, 10 bp, synthetic construct
  source 1..10: mol_type = other DNA
ctacggtagc

SEQ ID NO: 764 - DNA, 10 bp, synthetic construct
  source 1..10: mol_type = other DNA
agtaagcata

SEQ ID NO: 765 - DNA, 10 bp, synthetic construct
  source 1..10: mol_type = other DNA
cgcctcgaac

SEQ ID NO: 766 - DNA, 10 bp, synthetic construct
  source 1..10: mol_type = other DNA
ttaggatcta

SEQ ID NO: 767 - DNA, 10 bp, synthetic construct
  source 1..10: mol_type = other DNA
actactgaag

SEQ ID NO: 768 - DNA, 10 bp, synthetic construct
  source 1..10: mol_type = other DNA
aatctggagt

SEQ ID NO: 769 - DNA, 54 bp, synthetic construct
  source 1..54: mol_type = other DNA
aatgatacggcgaccaccgagatctacacccgcggctcaacactctttccctac

SEQ ID NO: 770 - DNA, 54 bp, synthetic construct
  source 1..54: mol_type = other DNA
aatgatacggcgaccaccgagatctacacggctcctcgtacactctttccctac

SEQ ID NO: 771 - DNA, 54 bp, synthetic construct
  source 1..54: mol_type = other DNA
aatgatacggcgaccaccgagatctacacgttacgcaagacactctttccctac

SEQ ID NO: 772 - DNA, 54 bp, synthetic construct
  source 1..54: mol_type = other DNA
aatgatacggcgaccaccgagatctacacagccggtaccacactctttccctac

SEQ ID NO: 773 - DNA, 54 bp, synthetic construct
  source 1..54: mol_type = other DNA
aatgatacggcgaccaccgagatctacacacctctatctacactctttccctac

SEQ ID NO: 774 - DNA, 54 bp, synthetic construct
  source 1..54: mol_type = other DNA
aatgatacggcgaccaccgagatctacacggactactacacactctttccctac

SEQ ID NO: 775 - DNA, 54 bp, synthetic construct
  source 1..54: mol_type = other DNA
aatgatacggcgaccaccgagatctacacgtatcatcgaacactctttccctac

SEQ ID NO: 776 - DNA, 54 bp, synthetic construct
  source 1..54: mol_type = other DNA
aatgatacggcgaccaccgagatctacacccgcgattatacactctttccctac

SEQ ID NO: 777 - DNA, 54 bp, synthetic construct
  source 1..54: mol_type = other DNA
aatgatacggcgaccaccgagatctacacattcaggtacacactctttccctac

SEQ ID NO: 778 - DNA, 54 bp, synthetic construct
  source 1..54: mol_type = other DNA
aatgatacggcgaccaccgagatctacacatggaattggacactctttccctac

SEQ ID NO: 779 - DNA, 54 bp, synthetic construct
  source 1..54: mol_type = other DNA
aatgatacggcgaccaccgagatctacacgacgaagcgtacactctttccctac

SEQ ID NO: 780 - DNA, 54 bp, synthetic construct
  source 1..54: mol_type = other DNA
aatgatacggcgaccaccgagatctacaccttgcagtagacactctttccctac

SEQ ID NO: 781 - DNA, 54 bp, synthetic construct
  source 1..54: mol_type = other DNA
aatgatacggcgaccaccgagatctacaccttggtaatgacactctttccctac

SEQ ID NO: 782 - DNA, 54 bp, synthetic construct
  source 1..54: mol_type = other DNA
aatgatacggcgaccaccgagatctacaccaagtcgaccacactctttccctac

SEQ ID NO: 783 - DNA, 54 bp, synthetic construct
  source 1..54: mol_type = other DNA
aatgatacggcgaccaccgagatctacactaacgaattgacactctttccctac

SEQ ID NO: 784 - DNA, 54 bp, synthetic construct
  source 1..54: mol_type = other DNA
aatgatacggcgaccaccgagatctacactgagaaccaaacactctttccctac

SEQ ID NO: 785 - DNA, 54 bp, synthetic construct
  source 1..54: mol_type = other DNA
aatgatacggcgaccaccgagatctacacttattctgagacactctttccctac

SEQ ID NO: 786 - DNA, 54 bp, synthetic construct
  source 1..54: mol_type = other DNA
aatgatacggcgaccaccgagatctacacttattatggtacactctttccctac

SEQ ID NO: 787 - DNA, 54 bp, synthetic construct
  source 1..54: mol_type = other DNA
aatgatacggcgaccaccgagatctacacatatgagccaacactctttccctac

SEQ ID NO: 788 - DNA, 54 bp, synthetic construct
  source 1..54: mol_type = other DNA
aatgatacggcgaccaccgagatctacaccaaccagtacacactctttccctac

SEQ ID NO: 789 - DNA, 54 bp, synthetic construct
  source 1..54: mol_type = other DNA
aatgatacggcgaccaccgagatctacaccatccgactaacactctttccctac

SEQ ID NO: 790 - DNA, 54 bp, synthetic construct
  source 1..54: mol_type = other DNA
aatgatacggcgaccaccgagatctacacatcatggctgacactctttccctac

SEQ ID NO: 791 - DNA, 54 bp, synthetic construct
  source 1..54: mol_type = other DNA
aatgatacggcgaccaccgagatctacacccgcaagttcacactctttccctac

SEQ ID NO: 792 - DNA, 54 bp, synthetic construct
  source 1..54: mol_type = other DNA
aatgatacggcgaccaccgagatctacaccttctcattgacactctttccctac

SEQ ID NO: 793 - DNA, 54 bp, synthetic construct
  source 1..54: mol_type = other DNA
aatgatacggcgaccaccgagatctacaccaggaggagaacactctttccctac

SEQ ID NO: 794 - DNA, 54 bp, synthetic construct
  source 1..54: mol_type = other DNA
aatgatacggcgaccaccgagatctacacgatatcggcgacactctttccctac

SEQ ID NO: 795 - DNA, 54 bp, synthetic construct
  source 1..54: mol_type = other DNA
aatgatacggcgaccaccgagatctacacccagtcctctacactctttccctac

SEQ ID NO: 796 - DNA, 54 bp, synthetic construct
  source 1..54: mol_type = other DNA
aatgatacggcgaccaccgagatctacaccatagttcggacactctttccctac

SEQ ID NO: 797 - DNA, 54 bp, synthetic construct
  source 1..54: mol_type = other DNA
aatgatacggcgaccaccgagatctacaccgtaatgcagacactctttccctac

SEQ ID NO: 798 - DNA, 54 bp, synthetic construct
  source 1..54: mol_type = other DNA
aatgatacggcgaccaccgagatctacacccgttcggatacactctttccctac

SEQ ID NO: 799 - DNA, 54 bp, synthetic construct
  source 1..54: mol_type = other DNA
aatgatacggcgaccaccgagatctacacccataagtccacactctttccctac

SEQ ID NO: 800 - DNA, 54 bp, synthetic construct
  source 1..54: mol_type = other DNA
aatgatacggcgaccaccgagatctacacggcaatgagaacactctttccctac

SEQ ID NO: 801 - DNA, 54 bp, synthetic construct
  source 1..54: mol_type = other DNA
aatgatacggcgaccaccgagatctacaccggttatgccacactctttccctac

SEQ ID NO: 802 - DNA, 54 bp, synthetic construct
  source 1..54: mol_type = other DNA
aatgatacggcgaccaccgagatctacactggccggcctacactctttccctac

SEQ ID NO: 803 - DNA, 54 bp, synthetic construct
  source 1..54: mol_type = other DNA
aatgatacggcgaccaccgagatctacacagctgcaataacactctttccctac

SEQ ID NO: 804 - DNA, 54 bp, synthetic construct
  source 1..54: mol_type = other DNA
aatgatacggcgaccaccgagatctacactggccatgcaacactctttccctac

SEQ ID NO: 805 - DNA, 54 bp, synthetic construct
  source 1..54: mol_type = other DNA
aatgatacggcgaccaccgagatctacactgacgctccgacactctttccctac

SEQ ID NO: 806 - DNA, 54 bp, synthetic construct
  source 1..54: mol_type = other DNA
aatgatacggcgaccaccgagatctacacaactgctgccacactctttccctac

SEQ ID NO: 807 - DNA, 54 bp, synthetic construct
  source 1..54: mol_type = other DNA
aatgatacggcgaccaccgagatctacactgcgcgatgcacactctttccctac

SEQ ID NO: 808 - DNA, 54 bp, synthetic construct
  source 1..54: mol_type = other DNA
aatgatacggcgaccaccgagatctacacattgagattgacactctttccctac

SEQ ID NO: 809 - DNA, 54 bp, synthetic construct
  source 1..54: mol_type = other DNA
aatgatacggcgaccaccgagatctacacttgatatattacactctttccctac

SEQ ID NO: 810 - DNA, 54 bp, synthetic construct
  source 1..54: mol_type = other DNA
aatgatacggcgaccaccgagatctacaccggtaggaatacactctttccctac

SEQ ID NO: 811 - DNA, 54 bp, synthetic construct
  source 1..54: mol_type = other DNA
aatgatacggcgaccaccgagatctacacaccagcgcagacactctttccctac

SEQ ID NO: 812 - DNA, 54 bp, synthetic construct
  source 1..54: mol_type = other DNA
aatgatacggcgaccaccgagatctacaccgaatgagctacactctttccctac

SEQ ID NO: 813 - DNA, 54 bp, synthetic construct
  source 1..54: mol_type = other DNA
aatgatacggcgaccaccgagatctacacagttcgagtaacactctttccctac

SEQ ID NO: 814 - DNA, 54 bp, synthetic construct
  source 1..54: mol_type = other DNA
aatgatacggcgaccaccgagatctacacttggacgctgacactctttccctac

SEQ ID NO: 815 - DNA, 54 bp, synthetic construct
  source 1..54: mol_type = other DNA
aatgatacggcgaccaccgagatctacacatagactaggacactctttccctac

SEQ ID NO: 816 - DNA, 54 bp, synthetic construct
  source 1..54: mol_type = other DNA
aatgatacggcgaccaccgagatctacactatagtaagcacactctttccctac

SEQ ID NO: 817 - DNA, 54 bp, synthetic construct
  source 1..54: mol_type = other DNA
aatgatacggcgaccaccgagatctacaccggtcgttaaacactctttccctac

SEQ ID NO: 818 - DNA, 54 bp, synthetic construct
  source 1..54: mol_type = other DNA
aatgatacggcgaccaccgagatctacacatggcggatcacactctttccctac

SEQ ID NO: 819 - DNA, 54 bp, synthetic construct
  source 1..54: mol_type = other DNA
aatgatacggcgaccaccgagatctacacctctgatcagacactctttccctac

SEQ ID NO: 820 - DNA, 54 bp, synthetic construct
  source 1..54: mol_type = other DNA
aatgatacggcgaccaccgagatctacacggccagtccgacactctttccctac

SEQ ID NO: 821 - DNA, 54 bp, synthetic construct
  source 1..54: mol_type = other DNA
aatgatacggcgaccaccgagatctacaccggaagatatacactctttccctac

SEQ ID NO: 822 - DNA, 54 bp, synthetic construct
  source 1..54: mol_type = other DNA
aatgatacggcgaccaccgagatctacactggctgatgaacactctttccctac

SEQ ID NO: 823 - DNA, 54 bp, synthetic construct
  source 1..54: mol_type = other DNA
aatgatacggcgaccaccgagatctacacgaaggttgccacactctttccctac

SEQ ID NO: 824 - DNA, 54 bp, synthetic construct
  source 1..54: mol_type = other DNA
aatgatacggcgaccaccgagatctacacgttgaaggatacactctttccctac

SEQ ID NO: 825 - DNA, 54 bp, synthetic construct
  source 1..54: mol_type = other DNA
aatgatacggcgaccaccgagatctacacccattcgtaaacactctttccctac

SEQ ID NO: 826 - DNA, 54 bp, synthetic construct
  source 1..54: mol_type = other DNA
aatgatacggcgaccaccgagatctacactgcgccagaaacactctttccctac

SEQ ID NO: 827 - DNA, 54 bp, synthetic construct
  source 1..54: mol_type = other DNA
aatgatacggcgaccaccgagatctacaccgaataattcacactctttccctac

SEQ ID NO: 828 - DNA, 54 bp, synthetic construct
  source 1..54: mol_type = other DNA
aatgatacggcgaccaccgagatctacacgcgacgccttacactctttccctac

SEQ ID NO: 829 - DNA, 54 bp, synthetic construct
  source 1..54: mol_type = other DNA
aatgatacggcgaccaccgagatctacacatcaacgattacactctttccctac

SEQ ID NO: 830 - DNA, 54 bp, synthetic construct
  source 1..54: mol_type = other DNA
aatgatacggcgaccaccgagatctacacgttctgaattacactctttccctac

SEQ ID NO: 831 - DNA, 54 bp, synthetic construct
  source 1..54: mol_type = other DNA
aatgatacggcgaccaccgagatctacacgctaacctcaacactctttccctac

SEQ ID NO: 832 - DNA, 54 bp, synthetic construct
  source 1..54: mol_type = other DNA
aatgatacggcgaccaccgagatctacaccaagcaactgacactctttccctac

SEQ ID NO: 833 - DNA, 54 bp, synthetic construct
  source 1..54: mol_type = other DNA
aatgatacggcgaccaccgagatctacacggagcggccgacactctttccctac

SEQ ID NO: 834 - DNA, 54 bp, synthetic construct
  source 1..54: mol_type = other DNA
aatgatacggcgaccaccgagatctacaccgcgtacgacacactctttccctac

SEQ ID NO: 835 - DNA, 54 bp, synthetic construct
  source 1..54: mol_type = other DNA
aatgatacggcgaccaccgagatctacaccgatggcgccacactctttccctac

SEQ ID NO: 836 - DNA, 54 bp, synthetic construct
  source 1..54: mol_type = other DNA
aatgatacggcgaccaccgagatctacactggtattcatacactctttccctac

SEQ ID NO: 837 - DNA, 54 bp, synthetic construct
  source 1..54: mol_type = other DNA
aatgatacggcgaccaccgagatctacacgataaggcaaacactctttccctac

SEQ ID NO: 838 - DNA, 54 bp, synthetic construct
  source 1..54: mol_type = other DNA
aatgatacggcgaccaccgagatctacacgccggtcgagacactctttccctac

SEQ ID NO: 839 - DNA, 54 bp, synthetic construct
  source 1..54: mol_type = other DNA
aatgatacggcgaccaccgagatctacactgcgccatctacactctttccctac

SEQ ID NO: 840 - DNA, 54 bp, synthetic construct
  source 1..54: mol_type = other DNA
aatgatacggcgaccaccgagatctacacaagtcttccgacactctttccctac

SEQ ID NO: 841 - DNA, 54 bp, synthetic construct
  source 1..54: mol_type = other DNA
aatgatacggcgaccaccgagatctacacagactcaagcacactctttccctac

SEQ ID NO: 842 - DNA, 54 bp, synthetic construct
  source 1..54: mol_type = other DNA
aatgatacggcgaccaccgagatctacacgcaggcgacgacactctttccctac

SEQ ID NO: 843 - DNA, 54 bp, synthetic construct
  source 1..54: mol_type = other DNA
aatgatacggcgaccaccgagatctacacaatactcttcacactctttccctac

SEQ ID NO: 844 - DNA, 54 bp, synthetic construct
  source 1..54: mol_type = other DNA
aatgatacggcgaccaccgagatctacacccaactaaccacactctttccctac

SEQ ID NO: 845 - DNA, 54 bp, synthetic construct
  source 1..54: mol_type = other DNA
aatgatacggcgaccaccgagatctacactatcctcaatacactctttccctac

SEQ ID NO: 846 - DNA, 54 bp, synthetic construct
  source 1..54: mol_type = other DNA
aatgatacggcgaccaccgagatctacacgccgtcgcgtacactctttccctac

SEQ ID NO: 847 - DNA, 54 bp, synthetic construct
  source 1..54: mol_type = other DNA
aatgatacggcgaccaccgagatctacacccgctgcttcacactctttccctac

SEQ ID NO: 848 - DNA, 54 bp, synthetic construct
  source 1..54: mol_type = other DNA
aatgatacggcgaccaccgagatctacactgaccgaatcacactctttccctac

SEQ ID NO: 849 - DNA, 54 bp, synthetic construct
  source 1..54: mol_type = other DNA
aatgatacggcgaccaccgagatctacacgtctccagagacactctttccctac

SEQ ID NO: 850 - DNA, 54 bp, synthetic construct
  source 1..54: mol_type = other DNA
aatgatacggcgaccaccgagatctacacaatgctagtcacactctttccctac

SEQ ID NO: 851 - DNA, 54 bp, synthetic construct
  source 1..54: mol_type = other DNA
aatgatacggcgaccaccgagatctacacgacgacctgcacactctttccctac

SEQ ID NO: 852 - DNA, 54 bp, synthetic construct
  source 1..54: mol_type = other DNA
aatgatacggcgaccaccgagatctacacagagccagccacactctttccctac

SEQ ID NO: 853 - DNA, 54 bp, synthetic construct
  source 1..54: mol_type = other DNA
aatgatacggcgaccaccgagatctacacccaggccgcaacactctttccctac

SEQ ID NO: 854 - DNA, 54 bp, synthetic construct
  source 1..54: mol_type = other DNA
aatgatacggcgaccaccgagatctacaccaggtatggaacactctttccctac

SEQ ID NO: 855 - DNA, 54 bp, synthetic construct
  source 1..54: mol_type = other DNA
aatgatacggcgaccaccgagatctacacccggagttgcacactctttccctac

SEQ ID NO: 856 - DNA, 54 bp, synthetic construct
  source 1..54: mol_type = other DNA
aatgatacggcgaccaccgagatctacacttaattattgacactctttccctac

SEQ ID NO: 857 - DNA, 54 bp, synthetic construct
  source 1..54: mol_type = other DNA
aatgatacggcgaccaccgagatctacacaatcagctgcacactctttccctac

SEQ ID NO: 858 - DNA, 54 bp, synthetic construct
  source 1..54: mol_type = other DNA
aatgatacggcgaccaccgagatctacacccgttgacttacactctttccctac

SEQ ID NO: 859 - DNA, 54 bp, synthetic construct
  source 1..54: mol_type = other DNA
aatgatacggcgaccaccgagatctacacgccaggatcaacactctttccctac

SEQ ID NO: 860 - DNA, 54 bp, synthetic construct
  source 1..54: mol_type = other DNA
aatgatacggcgaccaccgagatctacaccttcggcgcaacactctttccctac

SEQ ID NO: 861 - DNA, 54 bp, synthetic construct
  source 1..54: mol_type = other DNA
aatgatacggcgaccaccgagatctacaccaaggcattcacactctttccctac

SEQ ID NO: 862 - DNA, 54 bp, synthetic construct
  source 1..54: mol_type = other DNA
aatgatacggcgaccaccgagatctacacaagaatggaaacactctttccctac

SEQ ID NO: 863 - DNA, 54 bp, synthetic construct
  source 1..54: mol_type = other DNA
aatgatacggcgaccaccgagatctacaccggatgaaggacactctttccctac

SEQ ID NO: 864 - DNA, 54 bp, synthetic construct
  source 1..54: mol_type = other DNA
aatgatacggcgaccaccgagatctacactatcgtcggcacactctttccctac

SEQ ID NO: 865 - DNA, 54 bp, synthetic construct
  source 1..54: mol_type = other DNA
aatgatacggcgaccaccgagatctacacagagaacttgacactctttccctac

SEQ ID NO: 866 - DNA, 54 bp, synthetic construct
  source 1..54: mol_type = other DNA
aatgatacggcgaccaccgagatctacacagtcggctccacactctttccctac

SEQ ID NO: 867 - DNA, 54 bp, synthetic construct
  source 1..54: mol_type = other DNA
aatgatacggcgaccaccgagatctacactaccagagtaacactctttccctac

SEQ ID NO: 868 - DNA, 54 bp, synthetic construct
  source 1..54: mol_type = other DNA
aatgatacggcgaccaccgagatctacacaccgacctcaacactctttccctac

SEQ ID NO: 869 - DNA, 54 bp, synthetic construct
  source 1..54: mol_type = other DNA
aatgatacggcgaccaccgagatctacacatcctacctcacactctttccctac

SEQ ID NO: 870 - DNA, 54 bp, synthetic construct
  source 1..54: mol_type = other DNA
aatgatacggcgaccaccgagatctacactgcaaggcgtacactctttccctac

SEQ ID NO: 871 - DNA, 54 bp, synthetic construct
  source 1..54: mol_type = other DNA
aatgatacggcgaccaccgagatctacacttgctgcgccacactctttccctac

SEQ ID NO: 872 - DNA, 54 bp, synthetic construct
  source 1..54: mol_type = other DNA
aatgatacggcgaccaccgagatctacacccgcgctataacactctttccctac

SEQ ID NO: 873 - DNA, 54 bp, synthetic construct
  source 1..54: mol_type = other DNA
aatgatacggcgaccaccgagatctacacggacggagccacactctttccctac

SEQ ID NO: 874 - DNA, 54 bp, synthetic construct
  source 1..54: mol_type = other DNA
aatgatacggcgaccaccgagatctacacaatacttgcgacactctttccctac

SEQ ID NO: 875 - DNA, 54 bp, synthetic construct
  source 1..54: mol_type = other DNA
aatgatacggcgaccaccgagatctacacggattgactcacactctttccctac

SEQ ID NO: 876 - DNA, 54 bp, synthetic construct
  source 1..54: mol_type = other DNA
aatgatacggcgaccaccgagatctacacagcttacgaaacactctttccctac

SEQ ID NO: 877 - DNA, 54 bp, synthetic construct
  source 1..54: mol_type = other DNA
aatgatacggcgaccaccgagatctacactgatgcatcgacactctttccctac

SEQ ID NO: 878 - DNA, 54 bp, synthetic construct
  source 1..54: mol_type = other DNA
aatgatacggcgaccaccgagatctacacataatctcgcacactctttccctac

SEQ ID NO: 879 - DNA, 54 bp, synthetic construct
  source 1..54: mol_type = other DNA
aatgatacggcgaccaccgagatctacaccagcagtatcacactctttccctac

SEQ ID NO: 880 - DNA, 54 bp, synthetic construct
  source 1..54: mol_type = other DNA
aatgatacggcgaccaccgagatctacacacgaccaataacactctttccctac

SEQ ID NO: 881 - DNA, 54 bp, synthetic construct
  source 1..54: mol_type = other DNA
aatgatacggcgaccaccgagatctacaccggataggtaacactctttccctac

SEQ ID NO: 882 - DNA, 54 bp, synthetic construct
  source 1..54: mol_type = other DNA
aatgatacggcgaccaccgagatctacactcgaagcgcgacactctttccctac

SEQ ID NO: 883 - DNA, 54 bp, synthetic construct
  source 1..54: mol_type = other DNA
aatgatacggcgaccaccgagatctacacggtaagctctacactctttccctac

SEQ ID NO: 884 - DNA, 54 bp, synthetic construct
  source 1..54: mol_type = other DNA
aatgatacggcgaccaccgagatctacacaggtaattccacactctttccctac

SEQ ID NO: 885 - DNA, 54 bp, synthetic construct
  source 1..54: mol_type = other DNA
aatgatacggcgaccaccgagatctacacagaccattcaacactctttccctac

SEQ ID NO: 886 - DNA, 54 bp, synthetic construct
  source 1..54: mol_type = other DNA
aatgatacggcgaccaccgagatctacacctgatcgaccacactctttccctac

SEQ ID NO: 887 - DNA, 54 bp, synthetic construct
  source 1..54: mol_type = other DNA
aatgatacggcgaccaccgagatctacacgcaattactcacactctttccctac

SEQ ID NO: 888 - DNA, 54 bp, synthetic construct
  source 1..54: mol_type = other DNA
aatgatacggcgaccaccgagatctacacgaggagttcgacactctttccctac

SEQ ID NO: 889 - DNA, 54 bp, synthetic construct
  source 1..54: mol_type = other DNA
aatgatacggcgaccaccgagatctacactagtactatcacactctttccctac

SEQ ID NO: 890 - DNA, 54 bp, synthetic construct
  source 1..54: mol_type = other DNA
aatgatacggcgaccaccgagatctacaccgacttggcgacactctttccctac

SEQ ID NO: 891 - DNA, 54 bp, synthetic construct
  source 1..54: mol_type = other DNA
aatgatacggcgaccaccgagatctacacctattcggccacactctttccctac

SEQ ID NO: 892 - DNA, 54 bp, synthetic construct
  source 1..54: mol_type = other DNA
aatgatacggcgaccaccgagatctacaccttccaagaaacactctttccctac

SEQ ID NO: 893 - DNA, 54 bp, synthetic construct
  source 1..54: mol_type = other DNA
aatgatacggcgaccaccgagatctacaccgatcctggaacactctttccctac

SEQ ID NO: 894 - DNA, 54 bp, synthetic construct
  source 1..54: mol_type = other DNA
aatgatacggcgaccaccgagatctacactattccgttaacactctttccctac

SEQ ID NO: 895 - DNA, 54 bp, synthetic construct
  source 1..54: mol_type = other DNA
aatgatacggcgaccaccgagatctacacttagtacgccacactctttccctac

SEQ ID NO: 896 - DNA, 54 bp, synthetic construct
  source 1..54: mol_type = other DNA
aatgatacggcgaccaccgagatctacactcgtagcatcacactctttccctac

SEQ ID NO: 897 - DNA, 54 bp, synthetic construct
  source 1..54: mol_type = other DNA
aatgatacggcgaccaccgagatctacacgtattaagttacactctttccctac

SEQ ID NO: 898 - DNA, 54 bp, synthetic construct
  source 1..54: mol_type = other DNA
aatgatacggcgaccaccgagatctacaccattctagaaacactctttccctac

SEQ ID NO: 899 - DNA, 54 bp, synthetic construct
  source 1..54: mol_type = other DNA
aatgatacggcgaccaccgagatctacacggtagatcaaacactctttccctac

SEQ ID NO: 900 - DNA, 54 bp, synthetic construct
  source 1..54: mol_type = other DNA
aatgatacggcgaccaccgagatctacacatctcctacgacactctttccctac

SEQ ID NO: 901 - DNA, 54 bp, synthetic construct
  source 1..54: mol_type = other DNA
aatgatacggcgaccaccgagatctacacacgaagaagcacactctttccctac

SEQ ID NO: 902 - DNA, 54 bp, synthetic construct
  source 1..54: mol_type = other DNA
aatgatacggcgaccaccgagatctacacccgatcagccacactctttccctac

SEQ ID NO: 903 - DNA, 54 bp, synthetic construct
  source 1..54: mol_type = other DNA
aatgatacggcgaccaccgagatctacacctggcttcctacactctttccctac

SEQ ID NO: 904 - DNA, 54 bp, synthetic construct
  source 1..54: mol_type = other DNA
aatgatacggcgaccaccgagatctacacttcataatggacactctttccctac

SEQ ID NO: 905 - DNA, 54 bp, synthetic construct
  source 1..54: mol_type = other DNA
aatgatacggcgaccaccgagatctacacgttgaacgcaacactctttccctac

SEQ ID NO: 906 - DNA, 54 bp, synthetic construct
  source 1..54: mol_type = other DNA
aatgatacggcgaccaccgagatctacactaacggctgaacactctttccctac

SEQ ID NO: 907 - DNA, 54 bp, synthetic construct
  source 1..54: mol_type = other DNA
aatgatacggcgaccaccgagatctacacgaagtccgtcacactctttccctac

SEQ ID NO: 908 - DNA, 54 bp, synthetic construct
  source 1..54: mol_type = other DNA
aatgatacggcgaccaccgagatctacacatacgccgccacactctttccctac

SEQ ID NO: 909 - DNA, 54 bp, synthetic construct
  source 1..54: mol_type = other DNA
aatgatacggcgaccaccgagatctacacactggatgctacactctttccctac

SEQ ID NO: 910 - DNA, 54 bp, synthetic construct
  source 1..54: mol_type = other DNA
aatgatacggcgaccaccgagatctacacgagcgaatatacactctttccctac

SEQ ID NO: 911 - DNA, 54 bp, synthetic construct
  source 1..54: mol_type = other DNA
aatgatacggcgaccaccgagatctacactatatgaagtacactctttccctac

SEQ ID NO: 912 - DNA, 54 bp, synthetic construct
  source 1..54: mol_type = other DNA
aatgatacggcgaccaccgagatctacacacgataccggacactctttccctac

SEQ ID NO: 913 - DNA, 54 bp, synthetic construct
  source 1..54: mol_type = other DNA
aatgatacggcgaccaccgagatctacactcataccgctacactctttccctac

SEQ ID NO: 914 - DNA, 54 bp, synthetic construct
  source 1..54: mol_type = other DNA
aatgatacggcgaccaccgagatctacaccgctaaccgtacactctttccctac

SEQ ID NO: 915 - DNA, 54 bp, synthetic construct
  source 1..54: mol_type = other DNA
aatgatacggcgaccaccgagatctacaccgcatccatcacactctttccctac

SEQ ID NO: 916 - DNA, 54 bp, synthetic construct
  source 1..54: mol_type = other DNA
aatgatacggcgaccaccgagatctacaccgtcttccttacactctttccctac

SEQ ID NO: 917 - DNA, 54 bp, synthetic construct
  source 1..54: mol_type = other DNA
aatgatacggcgaccaccgagatctacacaacgctattaacactctttccctac

SEQ ID NO: 918 - DNA, 54 bp, synthetic construct
  source 1..54: mol_type = other DNA
aatgatacggcgaccaccgagatctacactaagataggtacactctttccctac

SEQ ID NO: 919 - DNA, 54 bp, synthetic construct
  source 1..54: mol_type = other DNA
aatgatacggcgaccaccgagatctacactgataatagcacactctttccctac

SEQ ID NO: 920 - DNA, 54 bp, synthetic construct
  source 1..54: mol_type = other DNA
aatgatacggcgaccaccgagatctacacggcctccattacactctttccctac

SEQ ID NO: 921 - DNA, 54 bp, synthetic construct
  source 1..54: mol_type = other DNA
aatgatacggcgaccaccgagatctacactgccgccgatacactctttccctac

SEQ ID NO: 922 - DNA, 54 bp, synthetic construct
  source 1..54: mol_type = other DNA
aatgatacggcgaccaccgagatctacactgcctattatacactctttccctac

SEQ ID NO: 923 - DNA, 54 bp, synthetic construct
  source 1..54: mol_type = other DNA
aatgatacggcgaccaccgagatctacacctgatacgtcacactctttccctac

SEQ ID NO: 924 - DNA, 54 bp, synthetic construct
  source 1..54: mol_type = other DNA
aatgatacggcgaccaccgagatctacacgacctggaatacactctttccctac

SEQ ID NO: 925 - DNA, 54 bp, synthetic construct
  source 1..54: mol_type = other DNA
aatgatacggcgaccaccgagatctacactcagatcggaacactctttccctac

SEQ ID NO: 926 - DNA, 54 bp, synthetic construct
  source 1..54: mol_type = other DNA
aatgatacggcgaccaccgagatctacacgaggcggaatacactctttccctac

SEQ ID NO: 927 - DNA, 54 bp, synthetic construct
  source 1..54: mol_type = other DNA
aatgatacggcgaccaccgagatctacaccagcgcatccacactctttccctac

SEQ ID NO: 928 - DNA, 54 bp, synthetic construct
  source 1..54: mol_type = other DNA
aatgatacggcgaccaccgagatctacacaatgccaagaacactctttccctac

SEQ ID NO: 929 - DNA, 54 bp, synthetic construct
  source 1..54: mol_type = other DNA
aatgatacggcgaccaccgagatctacactggtctacgtacactctttccctac

SEQ ID NO: 930 - DNA, 54 bp, synthetic construct
  source 1..54: mol_type = other DNA
aatgatacggcgaccaccgagatctacacggtcgccgctacactctttccctac

SEQ ID NO: 931 - DNA, 54 bp, synthetic construct
  source 1..54: mol_type = other DNA
aatgatacggcgaccaccgagatctacacagcaagtagtacactctttccctac

SEQ ID NO: 932 - DNA, 54 bp, synthetic construct
  source 1..54: mol_type = other DNA
aatgatacggcgaccaccgagatctacacaagaagttcaacactctttccctac

SEQ ID NO: 933 - DNA, 54 bp, synthetic construct
  source 1..54: mol_type = other DNA
aatgatacggcgaccaccgagatctacaccggcgctggcacactctttccctac

SEQ ID NO: 934 - DNA, 54 bp, synthetic construct
  source 1..54: mol_type = other DNA
aatgatacggcgaccaccgagatctacactcgtcaacttacactctttccctac

SEQ ID NO: 935 - DNA, 54 bp, synthetic construct
  source 1..54: mol_type = other DNA
aatgatacggcgaccaccgagatctacaccaacttggatacactctttccctac

SEQ ID NO: 936 - DNA, 54 bp, synthetic construct
  source 1..54: mol_type = other DNA
aatgatacggcgaccaccgagatctacacttggagctcaacactctttccctac

SEQ ID NO: 937 - DNA, 54 bp, synthetic construct
  source 1..54: mol_type = other DNA
aatgatacggcgaccaccgagatctacaccttagttcaaacactctttccctac

SEQ ID NO: 938 - DNA, 54 bp, synthetic construct
  source 1..54: mol_type = other DNA
aatgatacggcgaccaccgagatctacacttgaattataacactctttccctac

SEQ ID NO: 939 - DNA, 54 bp, synthetic construct
  source 1..54: mol_type = other DNA
aatgatacggcgaccaccgagatctacaccttcagcttcacactctttccctac

SEQ ID NO: 940 - DNA, 54 bp, synthetic construct
  source 1..54: mol_type = other DNA
aatgatacggcgaccaccgagatctacacgtataccgaaacactctttccctac

SEQ ID NO: 941 - DNA, 54 bp, synthetic construct
  source 1..54: mol_type = other DNA
aatgatacggcgaccaccgagatctacacggatataataacactctttccctac

SEQ ID NO: 942 - DNA, 54 bp, synthetic construct
  source 1..54: mol_type = other DNA
aatgatacggcgaccaccgagatctacacgaatcgacgtacactctttccctac

SEQ ID NO: 943 - DNA, 54 bp, synthetic construct
  source 1..54: mol_type = other DNA
aatgatacggcgaccaccgagatctacactgaacggtaaacactctttccctac

SEQ ID NO: 944 - DNA, 54 bp, synthetic construct
  source 1..54: mol_type = other DNA
aatgatacggcgaccaccgagatctacacaagtcgcgcgacactctttccctac

SEQ ID NO: 945 - DNA, 54 bp, synthetic construct
  source 1..54: mol_type = other DNA
aatgatacggcgaccaccgagatctacactccgcctactacactctttccctac

SEQ ID NO: 946 - DNA, 54 bp, synthetic construct
  source 1..54: mol_type = other DNA
aatgatacggcgaccaccgagatctacacttaatagttcacactctttccctac

SEQ ID NO: 947 - DNA, 54 bp, synthetic construct
  source 1..54: mol_type = other DNA
aatgatacggcgaccaccgagatctacaccaaccggatcacactctttccctac

SEQ ID NO: 948 - DNA, 54 bp, synthetic construct
  source 1..54: mol_type = other DNA
aatgatacggcgaccaccgagatctacacttagagcaacacactctttccctac

SEQ ID NO: 949 - DNA, 54 bp, synthetic construct
  source 1..54: mol_type = other DNA
aatgatacggcgaccaccgagatctacaccgtcattccaacactctttccctac

SEQ ID NO: 950 - DNA, 54 bp, synthetic construct
  source 1..54: mol_type = other DNA
aatgatacggcgaccaccgagatctacactaggaaggcaacactctttccctac

SEQ ID NO: 951 - DNA, 54 bp, synthetic construct
  source 1..54: mol_type = other DNA
aatgatacggcgaccaccgagatctacacttggcctataacactctttccctac

SEQ ID NO: 952 - DNA, 54 bp, synthetic construct
  source 1..54: mol_type = other DNA
aatgatacggcgaccaccgagatctacacgcgtctattcacactctttccctac

SEQ ID NO: 953 - DNA, 54 bp, synthetic construct
  source 1..54: mol_type = other DNA
aatgatacggcgaccaccgagatctacaccagagtagacacactctttccctac

SEQ ID NO: 954 - DNA, 54 bp, synthetic construct
  source 1..54: mol_type = other DNA
aatgatacggcgaccaccgagatctacacatgccggacgacactctttccctac

SEQ ID NO: 955 - DNA, 54 bp, synthetic construct
  source 1..54: mol_type = other DNA
aatgatacggcgaccaccgagatctacactattcgatctacactctttccctac

SEQ ID NO: 956 - DNA, 54 bp, synthetic construct
  source 1..54: mol_type = other DNA
aatgatacggcgaccaccgagatctacacatggatccgaacactctttccctac

SEQ ID NO: 957 - DNA, 54 bp, synthetic construct
  source 1..54: mol_type = other DNA
aatgatacggcgaccaccgagatctacacataatgcattacactctttccctac

SEQ ID NO: 958 - DNA, 54 bp, synthetic construct
  source 1..54: mol_type = other DNA
aatgatacggcgaccaccgagatctacacaagtagactaacactctttccctac

SEQ ID NO: 959 - DNA, 54 bp, synthetic construct
  source 1..54: mol_type = other DNA
aatgatacggcgaccaccgagatctacacatggaagcatacactctttccctac

SEQ ID NO: 960 - DNA, 54 bp, synthetic construct
  source 1..54: mol_type = other DNA
aatgatacggcgaccaccgagatctacactggatcaggcacactctttccctac

SEQ ID NO: 961 - DNA, 54 bp, synthetic construct
  source 1..54: mol_type = other DNA
aatgatacggcgaccaccgagatctacacgttacttagcacactctttccctac

SEQ ID NO: 962 - DNA, 54 bp, synthetic construct
  source 1..54: mol_type = other DNA
aatgatacggcgaccaccgagatctacacaccgccgcaaacactctttccctac

SEQ ID NO: 963 - DNA, 54 bp, synthetic construct
  source 1..54: mol_type = other DNA
aatgatacggcgaccaccgagatctacacctcaagtcctacactctttccctac

SEQ ID NO: 964 - DNA, 54 bp, synthetic construct
  source 1..54: mol_type = other DNA
aatgatacggcgaccaccgagatctacaccggtcgactaacactctttccctac

SEQ ID NO: 965 - DNA, 54 bp, synthetic construct
  source 1..54: mol_type = other DNA
aatgatacggcgaccaccgagatctacacttcgccgtaaacactctttccctac

SEQ ID NO: 966 - DNA, 54 bp, synthetic construct
  source 1..54: mol_type = other DNA
aatgatacggcgaccaccgagatctacacgctccgcttgacactctttccctac

SEQ ID NO: 967 - DNA, 54 bp, synthetic construct
  source 1..54: mol_type = other DNA
aatgatacggcgaccaccgagatctacacacttaagataacactctttccctac

SEQ ID NO: 968 - DNA, 54 bp, synthetic construct
  source 1..54: mol_type = other DNA
aatgatacggcgaccaccgagatctacacggcatggccaacactctttccctac

SEQ ID NO: 969 - DNA, 54 bp, synthetic construct
  source 1..54: mol_type = other DNA
aatgatacggcgaccaccgagatctacaccttcggtataacactctttccctac

SEQ ID NO: 970 - DNA, 54 bp, synthetic construct
  source 1..54: mol_type = other DNA
aatgatacggcgaccaccgagatctacacgagattcgccacactctttccctac

SEQ ID NO: 971 - DNA, 54 bp, synthetic construct
  source 1..54: mol_type = other DNA
aatgatacggcgaccaccgagatctacacctaggccgttacactctttccctac

SEQ ID NO: 972 - DNA, 54 bp, synthetic construct
  source 1..54: mol_type = other DNA
aatgatacggcgaccaccgagatctacacggccaacgatacactctttccctac

SEQ ID NO: 973 - DNA, 54 bp, synthetic construct
  source 1..54: mol_type = other DNA
aatgatacggcgaccaccgagatctacacacggaacctgacactctttccctac

SEQ ID NO: 974 - DNA, 54 bp, synthetic construct
  source 1..54: mol_type = other DNA
aatgatacggcgaccaccgagatctacactgattctcgtacactctttccctac

SEQ ID NO: 975 - DNA, 54 bp, synthetic construct
  source 1..54: mol_type = other DNA
aatgatacggcgaccaccgagatctacacttgcgtcaacacactctttccctac

SEQ ID NO: 976 - DNA, 54 bp, synthetic construct
  source 1..54: mol_type = other DNA
aatgatacggcgaccaccgagatctacacgaatgcaaccacactctttccctac

SEQ ID NO: 977 - DNA, 54 bp, synthetic construct
  source 1..54: mol_type = other DNA
aatgatacggcgaccaccgagatctacactgcggttcagacactctttccctac

SEQ ID NO: 978 - DNA, 54 bp, synthetic construct
  source 1..54: mol_type = other DNA
aatgatacggcgaccaccgagatctacacttggccaaccacactctttccctac

SEQ ID NO: 979 - DNA, 54 bp, synthetic construct
  source 1..54: mol_type = other DNA
aatgatacggcgaccaccgagatctacacttggttaagcacactctttccctac

SEQ ID NO: 980 - DNA, 54 bp, synthetic construct
  source 1..54: mol_type = other DNA
aatgatacggcgaccaccgagatctacaccttaagttcgacactctttccctac

SEQ ID NO: 981 - DNA, 54 bp, synthetic construct
  source 1..54: mol_type = other DNA
aatgatacggcgaccaccgagatctacacgtcctcagaaacactctttccctac

SEQ ID NO: 982 - DNA, 54 bp, synthetic construct
  source 1..54: mol_type = other DNA
aatgatacggcgaccaccgagatctacacggagtcgtctacactctttccctac

SEQ ID NO: 983 - DNA, 54 bp, synthetic construct
  source 1..54: mol_type = other DNA
aatgatacggcgaccaccgagatctacacggtacctctaacactctttccctac

SEQ ID NO: 984 - DNA, 54 bp, synthetic construct
  source 1..54: mol_type = other DNA
aatgatacggcgaccaccgagatctacacgatcgctgagacactctttccctac

SEQ ID NO: 985 - DNA, 54 bp, synthetic construct
  source 1..54: mol_type = other DNA
aatgatacggcgaccaccgagatctacacagagtactccacactctttccctac

SEQ ID NO: 986 - DNA, 54 bp, synthetic construct
  source 1..54: mol_type = other DNA
aatgatacggcgaccaccgagatctacactcattctattacactctttccctac

SEQ ID NO: 987 - DNA, 54 bp, synthetic construct
  source 1..54: mol_type = other DNA
aatgatacggcgaccaccgagatctacacgttactaccaacactctttccctac

SEQ ID NO: 988 - DNA, 54 bp, synthetic construct
  source 1..54: mol_type = other DNA
aatgatacggcgaccaccgagatctacacccagctcgccacactctttccctac

SEQ ID NO: 989 - DNA, 54 bp, synthetic construct
  source 1..54: mol_type = other DNA
aatgatacggcgaccaccgagatctacaccgccggtatgacactctttccctac

SEQ ID NO: 990 - DNA, 54 bp, synthetic construct
  source 1..54: mol_type = other DNA
aatgatacggcgaccaccgagatctacacttaattcgtaacactctttccctac

SEQ ID NO: 991 - DNA, 54 bp, synthetic construct
  source 1..54: mol_type = other DNA
aatgatacggcgaccaccgagatctacacgaaggctccaacactctttccctac

SEQ ID NO: 992 - DNA, 54 bp, synthetic construct
  source 1..54: mol_type = other DNA
aatgatacggcgaccaccgagatctacacgagacgtacgacactctttccctac

SEQ ID NO: 993 - DNA, 54 bp, synthetic construct
  source 1..54: mol_type = other DNA
aatgatacggcgaccaccgagatctacacgaagagcctcacactctttccctac

SEQ ID NO: 994 - DNA, 54 bp, synthetic construct
  source 1..54: mol_type = other DNA
aatgatacggcgaccaccgagatctacacccgatgcataacactctttccctac

SEQ ID NO: 995 - DNA, 54 bp, synthetic construct
  source 1..54: mol_type = other DNA
aatgatacggcgaccaccgagatctacacgtaatggtatacactctttccctac

SEQ ID NO: 996 - DNA, 54 bp, synthetic construct
  source 1..54: mol_type = other DNA
aatgatacggcgaccaccgagatctacacttctatctcaacactctttccctac

SEQ ID NO: 997 - DNA, 54 bp, synthetic construct
  source 1..54: mol_type = other DNA
aatgatacggcgaccaccgagatctacacgcagcagctaacactctttccctac

SEQ ID NO: 998 - DNA, 54 bp, synthetic construct
  source 1..54: mol_type = other DNA
aatgatacggcgaccaccgagatctacacttgctcgattacactctttccctac

SEQ ID NO: 999 - DNA, 54 bp, synthetic construct
  source 1..54: mol_type = other DNA
aatgatacggcgaccaccgagatctacaccctcatcggcacactctttccctac

SEQ ID NO: 1000 - DNA, 54 bp, synthetic construct
  source 1..54: mol_type = other DNA
aatgatacggcgaccaccgagatctacacacttcagcaaacactctttccctac

SEQ ID NO: 1001 - DNA, 54 bp, synthetic construct
  source 1..54: mol_type = other DNA
aatgatacggcgaccaccgagatctacacaggtcatcctacactctttccctac

SEQ ID NO: 1002 - DNA, 54 bp, synthetic construct
  source 1..54: mol_type = other DNA
aatgatacggcgaccaccgagatctacacaacgcgtcagacactctttccctac

SEQ ID NO: 1003 - DNA, 54 bp, synthetic construct
  source 1..54: mol_type = other DNA
aatgatacggcgaccaccgagatctacacctatgcttacacactctttccctac

SEQ ID NO: 1004 - DNA, 54 bp, synthetic construct
  source 1..54: mol_type = other DNA
aatgatacggcgaccaccgagatctacacgttgccgttcacactctttccctac

SEQ ID NO: 1005 - DNA, 54 bp, synthetic construct
  source 1..54: mol_type = other DNA
aatgatacggcgaccaccgagatctacacgcttaccgccacactctttccctac

SEQ ID NO: 1006 - DNA, 54 bp, synthetic construct
  source 1..54: mol_type = other DNA
aatgatacggcgaccaccgagatctacactggcaagtcaacactctttccctac

SEQ ID NO: 1007 - DNA, 54 bp, synthetic construct
  source 1..54: mol_type = other DNA
aatgatacggcgaccaccgagatctacaccatcgaaggaacactctttccctac

SEQ ID NO: 1008 - DNA, 54 bp, synthetic construct
  source 1..54: mol_type = other DNA
aatgatacggcgaccaccgagatctacacagaatcctcgacactctttccctac

SEQ ID NO: 1009 - DNA, 54 bp, synthetic construct
  source 1..54: mol_type = other DNA
aatgatacggcgaccaccgagatctacacgcaatcggttacactctttccctac

SEQ ID NO: 1010 - DNA, 54 bp, synthetic construct
  source 1..54: mol_type = other DNA
aatgatacggcgaccaccgagatctacaccctaagattcacactctttccctac

SEQ ID NO: 1011 - DNA, 54 bp, synthetic construct
  source 1..54: mol_type = other DNA
aatgatacggcgaccaccgagatctacaccctgcgcgcgacactctttccctac

SEQ ID NO: 1012 - DNA, 54 bp, synthetic construct
  source 1..54: mol_type = other DNA
aatgatacggcgaccaccgagatctacacatcagcgcgaacactctttccctac

SEQ ID NO: 1013 - DNA, 54 bp, synthetic construct
  source 1..54: mol_type = other DNA
aatgatacggcgaccaccgagatctacacgtacgattctacactctttccctac

SEQ ID NO: 1014 - DNA, 54 bp, synthetic construct
  source 1..54: mol_type = other DNA
aatgatacggcgaccaccgagatctacacttaccttgcaacactctttccctac

SEQ ID NO: 1015 - DNA, 54 bp, synthetic construct
  source 1..54: mol_type = other DNA
aatgatacggcgaccaccgagatctacacccggctcagcacactctttccctac

SEQ ID NO: 1016 - DNA, 54 bp, synthetic construct
  source 1..54: mol_type = other DNA
aatgatacggcgaccaccgagatctacacttctgcaagaacactctttccctac

SEQ ID NO: 1017 - DNA, 54 bp, synthetic construct
  source 1..54: mol_type = other DNA
aatgatacggcgaccaccgagatctacacatatacgcttacactctttccctac

SEQ ID NO: 1018 - DNA, 54 bp, synthetic construct
  source 1..54: mol_type = other DNA
aatgatacggcgaccaccgagatctacacctcagcaaccacactctttccctac

SEQ ID NO: 1019 - DNA, 54 bp, synthetic construct
  source 1..54: mol_type = other DNA
aatgatacggcgaccaccgagatctacaccaattctaggacactctttccctac

SEQ ID NO: 1020 - DNA, 54 bp, synthetic construct
  source 1..54: mol_type = other DNA
aatgatacggcgaccaccgagatctacacatcagtctcgacactctttccctac

SEQ ID NO: 1021 - DNA, 54 bp, synthetic construct
  source 1..54: mol_type = other DNA
aatgatacggcgaccaccgagatctacacaatccgcaacacactctttccctac

SEQ ID NO: 1022 - DNA, 54 bp, synthetic construct
  source 1..54: mol_type = other DNA
aatgatacggcgaccaccgagatctacaccggttaccttacactctttccctac

SEQ ID NO: 1023 - DNA, 54 bp, synthetic construct
  source 1..54: mol_type = other DNA
aatgatacggcgaccaccgagatctacacacgttaagacacactctttccctac

SEQ ID NO: 1024 - DNA, 54 bp, synthetic construct
  source 1..54: mol_type = other DNA
aatgatacggcgaccaccgagatctacacctatccaaccacactctttccctac

SEQ ID NO: 1025 - DNA, 54 bp, synthetic construct
  source 1..54: mol_type = other DNA
aatgatacggcgaccaccgagatctacacataagcgaatacactctttccctac

SEQ ID NO: 1026 - DNA, 54 bp, synthetic construct
  source 1..54: mol_type = other DNA
aatgatacggcgaccaccgagatctacaccttatatcggacactctttccctac

SEQ ID NO: 1027 - DNA, 54 bp, synthetic construct
  source 1..54: mol_type = other DNA
aatgatacggcgaccaccgagatctacacatatgacgacacactctttccctac

SEQ ID NO: 1028 - DNA, 54 bp, synthetic construct
  source 1..54: mol_type = other DNA
aatgatacggcgaccaccgagatctacacttaccgcataacactctttccctac

SEQ ID NO: 1029 - DNA, 54 bp, synthetic construct
  source 1..54: mol_type = other DNA
aatgatacggcgaccaccgagatctacacattcatcgccacactctttccctac

SEQ ID NO: 1030 - DNA, 54 bp, synthetic construct
  source 1..54: mol_type = other DNA
aatgatacggcgaccaccgagatctacacagaagcagaaacactctttccctac

SEQ ID NO: 1031 - DNA, 54 bp, synthetic construct
  source 1..54: mol_type = other DNA
aatgatacggcgaccaccgagatctacacgttcgtcgttacactctttccctac

SEQ ID NO: 1032 - DNA, 54 bp, synthetic construct
  source 1..54: mol_type = other DNA
aatgatacggcgaccaccgagatctacaccatgcttccaacactctttccctac

SEQ ID NO: 1033 - DNA, 54 bp, synthetic construct
  source 1..54: mol_type = other DNA
aatgatacggcgaccaccgagatctacactcggtaccagacactctttccctac

SEQ ID NO: 1034 - DNA, 54 bp, synthetic construct
  source 1..54: mol_type = other DNA
aatgatacggcgaccaccgagatctacacttgagccaatacactctttccctac

SEQ ID NO: 1035 - DNA, 54 bp, synthetic construct
  source 1..54: mol_type = other DNA
aatgatacggcgaccaccgagatctacacagatgactgaacactctttccctac

SEQ ID NO: 1036 - DNA, 54 bp, synthetic construct
  source 1..54: mol_type = other DNA
aatgatacggcgaccaccgagatctacacacgctagaagacactctttccctac

SEQ ID NO: 1037 - DNA, 54 bp, synthetic construct
  source 1..54: mol_type = other DNA
aatgatacggcgaccaccgagatctacacgttcaattgcacactctttccctac

SEQ ID NO: 1038 - DNA, 54 bp, synthetic construct
  source 1..54: mol_type = other DNA
aatgatacggcgaccaccgagatctacacggaccgtcaaacactctttccctac

SEQ ID NO: 1039 - DNA, 54 bp, synthetic construct
  source 1..54: mol_type = other DNA
aatgatacggcgaccaccgagatctacaccattaacggaacactctttccctac

SEQ ID NO: 1040 - DNA, 54 bp, synthetic construct
  source 1..54: mol_type = other DNA
aatgatacggcgaccaccgagatctacactaagcagtccacactctttccctac

SEQ ID NO: 1041 - DNA, 54 bp, synthetic construct
  source 1..54: mol_type = other DNA
aatgatacggcgaccaccgagatctacacccggtcagttacactctttccctac

SEQ ID NO: 1042 - DNA, 54 bp, synthetic construct
  source 1..54: mol_type = other DNA
aatgatacggcgaccaccgagatctacacataacggactacactctttccctac

SEQ ID NO: 1043 - DNA, 54 bp, synthetic construct
  source 1..54: mol_type = other DNA
aatgatacggcgaccaccgagatctacacacgagaagatacactctttccctac

SEQ ID NO: 1044 - DNA, 54 bp, synthetic construct
  source 1..54: mol_type = other DNA
aatgatacggcgaccaccgagatctacacatcctcttaaacactctttccctac

SEQ ID NO: 1045 - DNA, 54 bp, synthetic construct
  source 1..54: mol_type = other DNA
aatgatacggcgaccaccgagatctacacaatccaataaacactctttccctac

SEQ ID NO: 1046 - DNA, 54 bp, synthetic construct
  source 1..54: mol_type = other DNA
aatgatacggcgaccaccgagatctacacctagcaggatacactctttccctac

SEQ ID NO: 1047 - DNA, 54 bp, synthetic construct
  source 1..54: mol_type = other DNA
aatgatacggcgaccaccgagatctacactggtctcggaacactctttccctac

SEQ ID NO: 1048 - DNA, 54 bp, synthetic construct
  source 1..54: mol_type = other DNA
aatgatacggcgaccaccgagatctacacccgagtactaacactctttccctac

SEQ ID NO: 1049 - DNA, 54 bp, synthetic construct
  source 1..54: mol_type = other DNA
aatgatacggcgaccaccgagatctacacgatgacgaagacactctttccctac

SEQ ID NO: 1050 - DNA, 54 bp, synthetic construct
  source 1..54: mol_type = other DNA
aatgatacggcgaccaccgagatctacacggcagtcttcacactctttccctac

SEQ ID NO: 1051 - DNA, 54 bp, synthetic construct
  source 1..54: mol_type = other DNA
aatgatacggcgaccaccgagatctacacaatacgaataacactctttccctac

SEQ ID NO: 1052 - DNA, 54 bp, synthetic construct
  source 1..54: mol_type = other DNA
aatgatacggcgaccaccgagatctacacacctaggagaacactctttccctac

SEQ ID NO: 1053 - DNA, 54 bp, synthetic construct
  source 1..54: mol_type = other DNA
aatgatacggcgaccaccgagatctacacgaagcgccaaacactctttccctac

SEQ ID NO: 1054 - DNA, 54 bp, synthetic construct
  source 1..54: mol_type = other DNA
aatgatacggcgaccaccgagatctacaccgttacgttgacactctttccctac

SEQ ID NO: 1055 - DNA, 54 bp, synthetic construct
  source 1..54: mol_type = other DNA
aatgatacggcgaccaccgagatctacacgtcgcgaataacactctttccctac

SEQ ID NO: 1056 - DNA, 54 bp, synthetic construct
  source 1..54: mol_type = other DNA
aatgatacggcgaccaccgagatctacacttagagcctgacactctttccctac

SEQ ID NO: 1057 - DNA, 54 bp, synthetic construct
  source 1..54: mol_type = other DNA
aatgatacggcgaccaccgagatctacacacggtcatcaacactctttccctac

SEQ ID NO: 1058 - DNA, 54 bp, synthetic construct
  source 1..54: mol_type = other DNA
aatgatacggcgaccaccgagatctacacacgtagcaggacactctttccctac

SEQ ID NO: 1059 - DNA, 54 bp, synthetic construct
  source 1..54: mol_type = other DNA
aatgatacggcgaccaccgagatctacaccgaccgagagacactctttccctac

SEQ ID NO: 1060 - DNA, 54 bp, synthetic construct
  source 1..54: mol_type = other DNA
aatgatacggcgaccaccgagatctacacaagcggttctacactctttccctac

SEQ ID NO: 1061 - DNA, 54 bp, synthetic construct
  source 1..54: mol_type = other DNA
aatgatacggcgaccaccgagatctacactcggaataacacactctttccctac

SEQ ID NO: 1062 - DNA, 54 bp, synthetic construct
  source 1..54: mol_type = other DNA
aatgatacggcgaccaccgagatctacacaagttcgctgacactctttccctac

SEQ ID NO: 1063 - DNA, 54 bp, synthetic construct
  source 1..54: mol_type = other DNA
aatgatacggcgaccaccgagatctacacaataatcggtacactctttccctac

SEQ ID NO: 1064 - DNA, 54 bp, synthetic construct
  source 1..54: mol_type = other DNA
aatgatacggcgaccaccgagatctacacaggcgaaggcacactctttccctac

SEQ ID NO: 1065 - DNA, 54 bp, synthetic construct
  source 1..54: mol_type = other DNA
aatgatacggcgaccaccgagatctacacaagccgccgcacactctttccctac

SEQ ID NO: 1066 - DNA, 54 bp, synthetic construct
  source 1..54: mol_type = other DNA
aatgatacggcgaccaccgagatctacactcggccgatgacactctttccctac

SEQ ID NO: 1067 - DNA, 54 bp, synthetic construct
  source 1..54: mol_type = other DNA
aatgatacggcgaccaccgagatctacacagcgactgctacactctttccctac

SEQ ID NO: 1068 - DNA, 54 bp, synthetic construct
  source 1..54: mol_type = other DNA
aatgatacggcgaccaccgagatctacaccttaatgagcacactctttccctac

SEQ ID NO: 1069 - DNA, 54 bp, synthetic construct
  source 1..54: mol_type = other DNA
aatgatacggcgaccaccgagatctacacaattcctctcacactctttccctac

SEQ ID NO: 1070 - DNA, 54 bp, synthetic construct
  source 1..54: mol_type = other DNA
aatgatacggcgaccaccgagatctacacgctggtctccacactctttccctac

SEQ ID NO: 1071 - DNA, 54 bp, synthetic construct
  source 1..54: mol_type = other DNA
aatgatacggcgaccaccgagatctacacagtattgctaacactctttccctac

SEQ ID NO: 1072 - DNA, 54 bp, synthetic construct
  source 1..54: mol_type = other DNA
aatgatacggcgaccaccgagatctacactctaggataaacactctttccctac

SEQ ID NO: 1073 - DNA, 54 bp, synthetic construct
  source 1..54: mol_type = other DNA
aatgatacggcgaccaccgagatctacacggtcctgcaaacactctttccctac

SEQ ID NO: 1074 - DNA, 54 bp, synthetic construct
  source 1..54: mol_type = other DNA
aatgatacggcgaccaccgagatctacaccgcttcaattacactctttccctac

SEQ ID NO: 1075 - DNA, 54 bp, synthetic construct
  source 1..54: mol_type = other DNA
aatgatacggcgaccaccgagatctacacggattattatacactctttccctac

SEQ ID NO: 1076 - DNA, 54 bp, synthetic construct
  source 1..54: mol_type = other DNA
aatgatacggcgaccaccgagatctacactccggctgatacactctttccctac

SEQ ID NO: 1077 - DNA, 54 bp, synthetic construct
  source 1..54: mol_type = other DNA
aatgatacggcgaccaccgagatctacacccgcctcgttacactctttccctac

SEQ ID NO: 1078 - DNA, 54 bp, synthetic construct
  source 1..54: mol_type = other DNA
aatgatacggcgaccaccgagatctacacttataatcaaacactctttccctac

SEQ ID NO: 1079 - DNA, 54 bp, synthetic construct
  source 1..54: mol_type = other DNA
aatgatacggcgaccaccgagatctacacccattgaacgacactctttccctac

SEQ ID NO: 1080 - DNA, 54 bp, synthetic construct
  source 1..54: mol_type = other DNA
aatgatacggcgaccaccgagatctacacactccaacggacactctttccctac

SEQ ID NO: 1081 - DNA, 54 bp, synthetic construct
  source 1..54: mol_type = other DNA
aatgatacggcgaccaccgagatctacacacctcctgaaacactctttccctac

SEQ ID NO: 1082 - DNA, 54 bp, synthetic construct
  source 1..54: mol_type = other DNA
aatgatacggcgaccaccgagatctacacagaggccggcacactctttccctac

SEQ ID NO: 1083 - DNA, 54 bp, synthetic construct
  source 1..54: mol_type = other DNA
aatgatacggcgaccaccgagatctacacctgcctcttcacactctttccctac

SEQ ID NO: 1084 - DNA, 54 bp, synthetic construct
  source 1..54: mol_type = other DNA
aatgatacggcgaccaccgagatctacaccagtatccttacactctttccctac

SEQ ID NO: 1085 - DNA, 54 bp, synthetic construct
  source 1..54: mol_type = other DNA
aatgatacggcgaccaccgagatctacacgtcaactagcacactctttccctac

SEQ ID NO: 1086 - DNA, 54 bp, synthetic construct
  source 1..54: mol_type = other DNA
aatgatacggcgaccaccgagatctacactgacgcagtcacactctttccctac

SEQ ID NO: 1087 - DNA, 54 bp, synthetic construct
  source 1..54: mol_type = other DNA
aatgatacggcgaccaccgagatctacacgtcaatacgaacactctttccctac

SEQ ID NO: 1088 - DNA, 54 bp, synthetic construct
  source 1..54: mol_type = other DNA
aatgatacggcgaccaccgagatctacactgaacttcgaacactctttccctac

SEQ ID NO: 1089 - DNA, 54 bp, synthetic construct
  source 1..54: mol_type = other DNA
aatgatacggcgaccaccgagatctacaccgtaccaacgacactctttccctac

SEQ ID NO: 1090 - DNA, 54 bp, synthetic construct
  source 1..54: mol_type = other DNA
aatgatacggcgaccaccgagatctacacagagatgaatacactctttccctac

SEQ ID NO: 1091 - DNA, 54 bp, synthetic construct
  source 1..54: mol_type = other DNA
aatgatacggcgaccaccgagatctacactattccaattacactctttccctac

SEQ ID NO: 1092 - DNA, 54 bp, synthetic construct
  source 1..54: mol_type = other DNA
aatgatacggcgaccaccgagatctacacggatgcgattacactctttccctac

SEQ ID NO: 1093 - DNA, 54 bp, synthetic construct
  source 1..54: mol_type = other DNA
aatgatacggcgaccaccgagatctacacgtaaccaggtacactctttccctac

SEQ ID NO: 1094 - DNA, 54 bp, synthetic construct
  source 1..54: mol_type = other DNA
aatgatacggcgaccaccgagatctacaccctcgtcataacactctttccctac

SEQ ID NO: 1095 - DNA, 54 bp, synthetic construct
  source 1..54: mol_type = other DNA
aatgatacggcgaccaccgagatctacacaatggtcttaacactctttccctac

SEQ ID NO: 1096 - DNA, 54 bp, synthetic construct
  source 1..54: mol_type = other DNA
aatgatacggcgaccaccgagatctacacatgaatgcctacactctttccctac

SEQ ID NO: 1097 - DNA, 54 bp, synthetic construct
  source 1..54: mol_type = other DNA
aatgatacggcgaccaccgagatctacacgtccgtagatacactctttccctac

SEQ ID NO: 1098 - DNA, 54 bp, synthetic construct
  source 1..54: mol_type = other DNA
aatgatacggcgaccaccgagatctacacccatcctagtacactctttccctac

SEQ ID NO: 1099 - DNA, 54 bp, synthetic construct
  source 1..54: mol_type = other DNA
aatgatacggcgaccaccgagatctacactggttcctacacactctttccctac

SEQ ID NO: 1100 - DNA, 54 bp, synthetic construct
  source 1..54: mol_type = other DNA
aatgatacggcgaccaccgagatctacacgcgccttccgacactctttccctac

SEQ ID NO: 1101 - DNA, 54 bp, synthetic construct
  source 1..54: mol_type = other DNA
aatgatacggcgaccaccgagatctacaccgtactacgcacactctttccctac

SEQ ID NO: 1102 - DNA, 54 bp, synthetic construct
  source 1..54: mol_type = other DNA
aatgatacggcgaccaccgagatctacacggccgcggttacactctttccctac

SEQ ID NO: 1103 - DNA, 54 bp, synthetic construct
  source 1..54: mol_type = other DNA
aatgatacggcgaccaccgagatctacactggatagttgacactctttccctac

SEQ ID NO: 1104 - DNA, 54 bp, synthetic construct
  source 1..54: mol_type = other DNA
aatgatacggcgaccaccgagatctacaccggcgccaggacactctttccctac

SEQ ID NO: 1105 - DNA, 54 bp, synthetic construct
  source 1..54: mol_type = other DNA
aatgatacggcgaccaccgagatctacaccaagctcaggacactctttccctac

SEQ ID NO: 1106 - DNA, 54 bp, synthetic construct
  source 1..54: mol_type = other DNA
aatgatacggcgaccaccgagatctacacatcatccttcacactctttccctac

SEQ ID NO: 1107 - DNA, 54 bp, synthetic construct
  source 1..54: mol_type = other DNA
aatgatacggcgaccaccgagatctacaccctccggagtacactctttccctac

SEQ ID NO: 1108 - DNA, 54 bp, synthetic construct
  source 1..54: mol_type = other DNA
aatgatacggcgaccaccgagatctacacccattgctggacactctttccctac

SEQ ID NO: 1109 - DNA, 54 bp, synthetic construct
  source 1..54: mol_type = other DNA
aatgatacggcgaccaccgagatctacactattcgcagtacactctttccctac

SEQ ID NO: 1110 - DNA, 54 bp, synthetic construct
  source 1..54: mol_type = other DNA
aatgatacggcgaccaccgagatctacacccggttaagtacactctttccctac

SEQ ID NO: 1111 - DNA, 54 bp, synthetic construct
  source 1..54: mol_type = other DNA
aatgatacggcgaccaccgagatctacacatattctaccacactctttccctac

SEQ ID NO: 1112 - DNA, 54 bp, synthetic construct
  source 1..54: mol_type = other DNA
aatgatacggcgaccaccgagatctacactacggatcgtacactctttccctac

SEQ ID NO: 1113 - DNA, 54 bp, synthetic construct
  source 1..54: mol_type = other DNA
aatgatacggcgaccaccgagatctacacttctctccagacactctttccctac

SEQ ID NO: 1114 - DNA, 54 bp, synthetic construct
  source 1..54: mol_type = other DNA
aatgatacggcgaccaccgagatctacacccaagagcaaacactctttccctac

SEQ ID NO: 1115 - DNA, 54 bp, synthetic construct
  source 1..54: mol_type = other DNA
aatgatacggcgaccaccgagatctacacttggttcgagacactctttccctac

SEQ ID NO: 1116 - DNA, 54 bp, synthetic construct
  source 1..54: mol_type = other DNA
aatgatacggcgaccaccgagatctacacaacggattacacactctttccctac

SEQ ID NO: 1117 - DNA, 54 bp, synthetic construct
  source 1..54: mol_type = other DNA
aatgatacggcgaccaccgagatctacaccatcttcagaacactctttccctac

SEQ ID NO: 1118 - DNA, 54 bp, synthetic construct
  source 1..54: mol_type = other DNA
aatgatacggcgaccaccgagatctacacttgaacctccacactctttccctac

SEQ ID NO: 1119 - DNA, 54 bp, synthetic construct
  source 1..54: mol_type = other DNA
aatgatacggcgaccaccgagatctacacggaattccaaacactctttccctac

SEQ ID NO: 1120 - DNA, 54 bp, synthetic construct
  source 1..54: mol_type = other DNA
aatgatacggcgaccaccgagatctacacataggtccaaacactctttccctac

SEQ ID NO: 1121 - DNA, 54 bp, synthetic construct
  source 1..54: mol_type = other DNA
aatgatacggcgaccaccgagatctacacgccatggtacacactctttccctac

SEQ ID NO: 1122 - DNA, 54 bp, synthetic construct
  source 1..54: mol_type = other DNA
aatgatacggcgaccaccgagatctacacgagctcttcaacactctttccctac

SEQ ID NO: 1123 - DNA, 54 bp, synthetic construct
  source 1..54: mol_type = other DNA
aatgatacggcgaccaccgagatctacacccgaggcaacacactctttccctac

SEQ ID NO: 1124 - DNA, 54 bp, synthetic construct
  source 1..54: mol_type = other DNA
aatgatacggcgaccaccgagatctacacgtctctagttacactctttccctac

SEQ ID NO: 1125 - DNA, 54 bp, synthetic construct
  source 1..54: mol_type = other DNA
aatgatacggcgaccaccgagatctacacgctggttataacactctttccctac

SEQ ID NO: 1126 - DNA, 54 bp, synthetic construct
  source 1..54: mol_type = other DNA
aatgatacggcgaccaccgagatctacactcgtaggtcaacactctttccctac

SEQ ID NO: 1127 - DNA, 54 bp, synthetic construct
  source 1..54: mol_type = other DNA
aatgatacggcgaccaccgagatctacacaactcagacgacactctttccctac

SEQ ID NO: 1128 - DNA, 54 bp, synthetic construct
  source 1..54: mol_type = other DNA
aatgatacggcgaccaccgagatctacactgctgccggaacactctttccctac

SEQ ID NO: 1129 - DNA, 54 bp, synthetic construct
  source 1..54: mol_type = other DNA
aatgatacggcgaccaccgagatctacactggaggcaagacactctttccctac

SEQ ID NO: 1130 - DNA, 54 bp, synthetic construct
  source 1..54: mol_type = other DNA
aatgatacggcgaccaccgagatctacacactgatgcgaacactctttccctac

SEQ ID NO: 1131 - DNA, 54 bp, synthetic construct
  source 1..54: mol_type = other DNA
aatgatacggcgaccaccgagatctacacacgactcctcacactctttccctac

SEQ ID NO: 1132 - DNA, 54 bp, synthetic construct
  source 1..54: mol_type = other DNA
aatgatacggcgaccaccgagatctacactggcagcgaaacactctttccctac

SEQ ID NO: 1133 - DNA, 54 bp, synthetic construct
  source 1..54: mol_type = other DNA
aatgatacggcgaccaccgagatctacacccgatactctacactctttccctac

SEQ ID NO: 1134 - DNA, 54 bp, synthetic construct
  source 1..54: mol_type = other DNA
aatgatacggcgaccaccgagatctacaccaatataggcacactctttccctac

SEQ ID NO: 1135 - DNA, 54 bp, synthetic construct
  source 1..54: mol_type = other DNA
aatgatacggcgaccaccgagatctacacaccggccgacacactctttccctac

SEQ ID NO: 1136 - DNA, 54 bp, synthetic construct
  source 1..54: mol_type = other DNA
aatgatacggcgaccaccgagatctacacaataaggctcacactctttccctac

SEQ ID NO: 1137 - DNA, 54 bp, synthetic construct
  source 1..54: mol_type = other DNA
aatgatacggcgaccaccgagatctacaccatcatagcaacactctttccctac

SEQ ID NO: 1138 - DNA, 54 bp, synthetic construct
  source 1..54: mol_type = other DNA
aatgatacggcgaccaccgagatctacacgatgatccatacactctttccctac

SEQ ID NO: 1139 - DNA, 54 bp, synthetic construct
  source 1..54: mol_type = other DNA
aatgatacggcgaccaccgagatctacacatggcaatacacactctttccctac

SEQ ID NO: 1140 - DNA, 54 bp, synthetic construct
  source 1..54: mol_type = other DNA
aatgatacggcgaccaccgagatctacacaccagaaccaacactctttccctac

SEQ ID NO: 1141 - DNA, 54 bp, synthetic construct
  source 1..54: mol_type = other DNA
aatgatacggcgaccaccgagatctacacggttcgacctacactctttccctac

SEQ ID NO: 1142 - DNA, 54 bp, synthetic construct
  source 1..54: mol_type = other DNA
aatgatacggcgaccaccgagatctacaccttggacggaacactctttccctac

SEQ ID NO: 1143 - DNA, 54 bp, synthetic construct
  source 1..54: mol_type = other DNA
aatgatacggcgaccaccgagatctacaccggtctcataacactctttccctac

SEQ ID NO: 1144 - DNA, 54 bp, synthetic construct
  source 1..54: mol_type = other DNA
aatgatacggcgaccaccgagatctacacaatcagagccacactctttccctac

SEQ ID NO: 1145 - DNA, 54 bp, synthetic construct
  source 1..54: mol_type = other DNA
aatgatacggcgaccaccgagatctacaccctgaatactacactctttccctac

SEQ ID NO: 1146 - DNA, 54 bp, synthetic construct
  source 1..54: mol_type = other DNA
aatgatacggcgaccaccgagatctacaccttggagactacactctttccctac

SEQ ID NO: 1147 - DNA, 54 bp, synthetic construct
  source 1..54: mol_type = other DNA
aatgatacggcgaccaccgagatctacacaagaccttacacactctttccctac

SEQ ID NO: 1148 - DNA, 54 bp, synthetic construct
  source 1..54: mol_type = other DNA
aatgatacggcgaccaccgagatctacacgcgagcgctcacactctttccctac

SEQ ID NO: 1149 - DNA, 54 bp, synthetic construct
  source 1..54: mol_type = other DNA
aatgatacggcgaccaccgagatctacactcgcaagacgacactctttccctac

SEQ ID NO: 1150 - DNA, 54 bp, synthetic construct
  source 1..54: mol_type = other DNA
aatgatacggcgaccaccgagatctacaccaatctcggaacactctttccctac

SEQ ID NO: 1151 - DNA, 54 bp, synthetic construct
  source 1..54: mol_type = other DNA
aatgatacggcgaccaccgagatctacactcgacctaccacactctttccctac

SEQ ID NO: 1152 - DNA, 54 bp, synthetic construct
  source 1..54: mol_type = other DNA
aatgatacggcgaccaccgagatctacacttataggcatacactctttccctac

SEQ ID NO: 1153 - DNA, 10 bp, synthetic construct
  source 1..10: mol_type = other DNA
ccgcggctca

SEQ ID NO: 1154 - DNA, 10 bp, synthetic construct
  source 1..10: mol_type = other DNA
ggctcctcgt

SEQ ID NO: 1155 - DNA, 10 bp, synthetic construct
  source 1..10: mol_type = other DNA
gttacgcaag

SEQ ID NO: 1156 - DNA, 10 bp, synthetic construct
  source 1..10: mol_type = other DNA
agccggtacc

SEQ ID NO: 1157 - DNA, 10 bp, synthetic construct
  source 1..10: mol_type = other DNA
acctctatct

SEQ ID NO: 1158 - DNA, 10 bp, synthetic construct
  source 1..10: mol_type = other DNA
ggactactac

SEQ ID NO: 1159 - DNA, 10 bp, synthetic construct
  source 1..10: mol_type = other DNA
gtatcatcga

SEQ ID NO: 1160 - DNA, 10 bp, synthetic construct
  source 1..10: mol_type = other DNA
ccgcgattat

SEQ ID NO: 1161 - DNA, 10 bp, synthetic construct
  source 1..10: mol_type = other DNA
attcaggtac

SEQ ID NO: 1162 - DNA, 10 bp, synthetic construct
  source 1..10: mol_type = other DNA
atggaattgg

SEQ ID NO: 1163 - DNA, 10 bp, synthetic construct
  source 1..10: mol_type = other DNA
gacgaagcgt

SEQ ID NO: 1164 - DNA, 10 bp, synthetic construct
  source 1..10: mol_type = other DNA
cttgcagtag

SEQ ID NO: 1165 - DNA, 10 bp, synthetic construct
  source 1..10: mol_type = other DNA
cttggtaatg

SEQ ID NO: 1166 - DNA, 10 bp, synthetic construct
  source 1..10: mol_type = other DNA
caagtcgacc

SEQ ID NO: 1167 - DNA, 10 bp, synthetic construct
  source 1..10: mol_type = other DNA
taacgaattg

SEQ ID NO: 1168 - DNA, 10 bp, synthetic construct
  source 1..10: mol_type = other DNA
tgagaaccaa

SEQ ID NO: 1169 - DNA, 10 bp, synthetic construct
  source 1..10: mol_type = other DNA
ttattctgag

SEQ ID NO: 1170 - DNA, 10 bp, synthetic construct
  source 1..10: mol_type = other DNA
ttattatggt

SEQ ID NO: 1171 - DNA, 10 bp, synthetic construct
  source 1..10: mol_type = other DNA
atatgagcca

SEQ ID NO: 1172 - DNA, 10 bp, synthetic construct
  source 1..10: mol_type = other DNA
caaccagtac

SEQ ID NO: 1173 - DNA, 10 bp, synthetic construct
  source 1..10: mol_type = other DNA
catccgacta

SEQ ID NO: 1174 - DNA, 10 bp, synthetic construct
  source 1..10: mol_type = other DNA
atcatggctg

SEQ ID NO: 1175 - DNA, 10 bp, synthetic construct
  source 1..10: mol_type = other DNA
ccgcaagttc

SEQ ID NO: 1176 - DNA, 10 bp, synthetic construct
  source 1..10: mol_type = other DNA
cttctcattg

SEQ ID NO: 1177 - DNA, 10 bp, synthetic construct
  source 1..10: mol_type = other DNA
caggaggaga

SEQ ID NO: 1178 - DNA, 10 bp, synthetic construct
  source 1..10: mol_type = other DNA
gatatcggcg

SEQ ID NO: 1179 - DNA, 10 bp, synthetic construct
  source 1..10: mol_type = other DNA
ccagtcctct

SEQ ID NO: 1180 - DNA, 10 bp, synthetic construct
  source 1..10: mol_type = other DNA
catagttcgg

SEQ ID NO: 1181 - DNA, 10 bp, synthetic construct
  source 1..10: mol_type = other DNA
cgtaatgcag

SEQ ID NO: 1182 - DNA, 10 bp, synthetic construct
  source 1..10: mol_type = other DNA
ccgttcggat

SEQ ID NO: 1183 - DNA, 10 bp, synthetic construct
  source 1..10: mol_type = other DNA
ccataagtcc

SEQ ID NO: 1184 - DNA, 10 bp, synthetic construct
  source 1..10: mol_type = other DNA
ggcaatgaga

SEQ ID NO: 1185 - DNA, 10 bp, synthetic construct
  source 1..10: mol_type = other DNA
cggttatgcc

SEQ ID NO: 1186 - DNA, 10 bp, synthetic construct
  source 1..10: mol_type = other DNA
tggccggcct

SEQ ID NO: 1187 - DNA, 10 bp, synthetic construct
  source 1..10: mol_type = other DNA
agctgcaata

SEQ ID NO: 1188 - DNA, 10 bp, synthetic construct
  source 1..10: mol_type = other DNA
tggccatgca

SEQ ID NO: 1189 - DNA, 10 bp, synthetic construct
  source 1..10: mol_type = other DNA
tgacgctccg

SEQ ID NO: 1190 - DNA, 10 bp, synthetic construct
  source 1..10: mol_type = other DNA
aactgctgcc

SEQ ID NO: 1191 - DNA, 10 bp, synthetic construct
  source 1..10: mol_type = other DNA
tgcgcgatgc

SEQ ID NO: 1192 - DNA, 10 bp, synthetic construct
  source 1..10: mol_type = other DNA
attgagattg

SEQ ID NO: 1193 - DNA, 10 bp, synthetic construct
  source 1..10: mol_type = other DNA
ttgatatatt

SEQ ID NO: 1194 - DNA, 10 bp, synthetic construct
  source 1..10: mol_type = other DNA
cggtaggaat

SEQ ID NO: 1195 - DNA, 10 bp, synthetic construct
  source 1..10: mol_type = other DNA
accagcgcag

SEQ ID NO: 1196 - DNA, 10 bp, synthetic construct
  source 1..10: mol_type = other DNA
cgaatgagct

SEQ ID NO: 1197 - DNA, 10 bp, synthetic construct
  source 1..10: mol_type = other DNA
agttcgagta

SEQ ID NO: 1198 - DNA, 10 bp, synthetic construct
  source 1..10: mol_type = other DNA
ttggacgctg

SEQ ID NO: 1199 - DNA, 10 bp, synthetic construct
  source 1..10: mol_type = other DNA
atagactagg

SEQ ID NO: 1200 - DNA, 10 bp, synthetic construct
  source 1..10: mol_type = other DNA
tatagtaagc

SEQ ID NO: 1201 - DNA, 10 bp, synthetic construct
  source 1..10: mol_type = other DNA
cggtcgttaa

SEQ ID NO: 1202 - DNA, 10 bp, synthetic construct
  source 1..10: mol_type = other DNA
atggcggatc

SEQ ID NO: 1203 - DNA, 10 bp, synthetic construct
  source 1..10: mol_type = other DNA
ctctgatcag

SEQ ID NO: 1204 - DNA, 10 bp, synthetic construct
  source 1..10: mol_type = other DNA
ggccagtccg

SEQ ID NO: 1205 - DNA, 10 bp, synthetic construct
  source 1..10: mol_type = other DNA
cggaagatat

SEQ ID NO: 1206 - DNA, 10 bp, synthetic construct
  source 1..10: mol_type = other DNA
tggctgatga

SEQ ID NO: 1207 - DNA, 10 bp, synthetic construct
  source 1..10: mol_type = other DNA
gaaggttgcc

SEQ ID NO: 1208 - DNA, 10 bp, synthetic construct
  source 1..10: mol_type = other DNA
gttgaaggat

SEQ ID NO: 1209 - DNA, 10 bp, synthetic construct
  source 1..10: mol_type = other DNA
ccattcgtaa

SEQ ID NO: 1210 - DNA, 10 bp, synthetic construct
  source 1..10: mol_type = other DNA
tgcgccagaa

SEQ ID NO: 1211 - DNA, 10 bp, synthetic construct
  source 1..10: mol_type = other DNA
cgaataattc

SEQ ID NO: 1212 - DNA, 10 bp, synthetic construct
  source 1..10: mol_type = other DNA
gcgacgcctt

SEQ ID NO: 1213 - DNA, 10 bp, synthetic construct
  source 1..10: mol_type = other DNA
atcaacgatt

SEQ ID NO: 1214 - DNA, 10 bp, synthetic construct
  source 1..10: mol_type = other DNA
gttctgaatt

SEQ ID NO: 1215 - DNA, 10 bp, synthetic construct
  source 1..10: mol_type = other DNA
gctaacctca

SEQ ID NO: 1216 - DNA, 10 bp, synthetic construct
  source 1..10: mol_type = other DNA
caagcaactg

SEQ ID NO: 1217 - DNA, 10 bp, synthetic construct
  source 1..10: mol_type = other DNA
ggagcggccg

SEQ ID NO: 1218 - DNA, 10 bp, synthetic construct
  source 1..10: mol_type = other DNA
cgcgtacgac

SEQ ID NO: 1219 - DNA, 10 bp, synthetic construct
  source 1..10: mol_type = other DNA
cgatggcgcc

SEQ ID NO: 1220 - DNA, 10 bp, synthetic construct
  source 1..10: mol_type = other DNA
tggtattcat

SEQ ID NO: 1221 - DNA, 10 bp, synthetic construct
  source 1..10: mol_type = other DNA
gataaggcaa

SEQ ID NO: 1222 - DNA, 10 bp, synthetic construct
  source 1..10: mol_type = other DNA
gccggtcgag

SEQ ID NO: 1223 - DNA, 10 bp, synthetic construct
  source 1..10: mol_type = other DNA
tgcgccatct

SEQ ID NO: 1224 - DNA, 10 bp, synthetic construct
  source 1..10: mol_type = other DNA
aagtcttccg

SEQ ID NO: 1225 - DNA, 10 bp, synthetic construct
  source 1..10: mol_type = other DNA
agactcaagc

SEQ ID NO: 1226 - DNA, 10 bp, synthetic construct
  source 1..10: mol_type = other DNA
gcaggcgacg

SEQ ID NO: 1227 - DNA, 10 bp, synthetic construct
  source 1..10: mol_type = other DNA
aatactcttc

SEQ ID NO: 1228 - DNA, 10 bp, synthetic construct
  source 1..10: mol_type = other DNA
ccaactaacc

SEQ ID NO: 1229 - DNA, 10 bp, synthetic construct
  source 1..10: mol_type = other DNA
tatcctcaat

SEQ ID NO: 1230 - DNA, 10 bp, synthetic construct
  source 1..10: mol_type = other DNA
gccgtcgcgt

SEQ ID NO: 1231 - DNA, 10 bp, synthetic construct
  source 1..10: mol_type = other DNA
ccgctgcttc

SEQ ID NO: 1232 - DNA, 10 bp, synthetic construct
  source 1..10: mol_type = other DNA
tgaccgaatc

SEQ ID NO: 1233 - DNA, 10 bp, synthetic construct
  source 1..10: mol_type = other DNA
gtctccagag

SEQ ID NO: 1234 - DNA, 10 bp, synthetic construct
  source 1..10: mol_type = other DNA
aatgctagtc

SEQ ID NO: 1235 - DNA, 10 bp, synthetic construct
  source 1..10: mol_type = other DNA
gacgacctgc

SEQ ID NO: 1236 - DNA, 10 bp, synthetic construct
  source 1..10: mol_type = other DNA
agagccagcc

SEQ ID NO: 1237 - DNA, 10 bp, synthetic construct
  source 1..10: mol_type = other DNA
ccaggccgca

SEQ ID NO: 1238 - DNA, 10 bp, synthetic construct
  source 1..10: mol_type = other DNA
caggtatgga

SEQ ID NO: 1239 - DNA, 10 bp, synthetic construct
  source 1..10: mol_type = other DNA
ccggagttgc

SEQ ID NO: 1240 - DNA, 10 bp, synthetic construct
  source 1..10: mol_type = other DNA
ttaattattg

SEQ ID NO: 1241 - DNA, 10 bp, synthetic construct
  source 1..10: mol_type = other DNA
aatcagctgc

SEQ ID NO: 1242 - DNA, 10 bp, synthetic construct
  source 1..10: mol_type = other DNA
ccgttgactt

SEQ ID NO: 1243 - DNA, 10 bp, synthetic construct
  source 1..10: mol_type = other DNA
gccaggatca

SEQ ID NO: 1244 - DNA, 10 bp, synthetic construct
  source 1..10: mol_type = other DNA
cttcggcgca

SEQ ID NO: 1245 - DNA, 10 bp, synthetic construct
  source 1..10: mol_type = other DNA
caaggcattc

SEQ ID NO: 1246 - DNA, 10 bp, synthetic construct
  source 1..10: mol_type = other DNA
aagaatggaa

SEQ ID NO: 1247 - DNA, 10 bp, synthetic construct
  source 1..10: mol_type = other DNA
cggatgaagg

SEQ ID NO: 1248 - DNA, 10 bp, synthetic construct
  source 1..10: mol_type = other DNA
tatcgtcggc

SEQ ID NO: 1249 - DNA, 10 bp, synthetic construct
  source 1..10: mol_type = other DNA
agagaacttg

SEQ ID NO: 1250 - DNA, 10 bp, synthetic construct
  source 1..10: mol_type = other DNA
agtcggctcc

SEQ ID NO: 1251 - DNA, 10 bp, synthetic construct
  source 1..10: mol_type = other DNA
taccagagta

SEQ ID NO: 1252 - DNA, 10 bp, synthetic construct
  source 1..10: mol_type = other DNA
accgacctca

SEQ ID NO: 1253 - DNA, 10 bp, synthetic construct
  source 1..10: mol_type = other DNA
atcctacctc

SEQ ID NO: 1254 - DNA, 10 bp, synthetic construct
  source 1..10: mol_type = other DNA
tgcaaggcgt

SEQ ID NO: 1255 - DNA, 10 bp, synthetic construct
  source 1..10: mol_type = other DNA
ttgctgcgcc

SEQ ID NO: 1256 - DNA, 10 bp, synthetic construct
  source 1..10: mol_type = other DNA
ccgcgctata

SEQ ID NO: 1257 - DNA, 10 bp, synthetic construct
  source 1..10: mol_type = other DNA
ggacggagcc

SEQ ID NO: 1258 - DNA, 10 bp, synthetic construct
  source 1..10: mol_type = other DNA
aatacttgcg

SEQ ID NO: 1259 - DNA, 10 bp, synthetic construct
  source 1..10: mol_type = other DNA
ggattgactc

SEQ ID NO: 1260 - DNA, 10 bp, synthetic construct
  source 1..10: mol_type = other DNA
agcttacgaa

SEQ ID NO: 1261 - DNA, 10 bp, synthetic construct
  source 1..10: mol_type = other DNA
tgatgcatcg

SEQ ID NO: 1262 - DNA, 10 bp, synthetic construct
  source 1..10: mol_type = other DNA
ataatctcgc

SEQ ID NO: 1263 - DNA, 10 bp, synthetic construct
  source 1..10: mol_type = other DNA
cagcagtatc

SEQ ID NO: 1264 - DNA, 10 bp, synthetic construct
  source 1..10: mol_type = other DNA
acgaccaata

SEQ ID NO: 1265 - DNA, 10 bp, synthetic construct
  source 1..10: mol_type = other DNA
cggataggta

SEQ ID NO: 1266 - DNA, 10 bp, synthetic construct
  source 1..10: mol_type = other DNA
tcgaagcgcg

SEQ ID NO: 1267 - DNA, 10 bp, synthetic construct
  source 1..10: mol_type = other DNA
ggtaagctct

SEQ ID NO: 1268 - DNA, 10 bp, synthetic construct
  source 1..10: mol_type = other DNA
aggtaattcc

SEQ ID NO: 1269 - DNA, 10 bp, synthetic construct
  source 1..10: mol_type = other DNA
agaccattca

SEQ ID NO: 1270 - DNA, 10 bp, synthetic construct
  source 1..10: mol_type = other DNA
ctgatcgacc

SEQ ID NO: 1271 - DNA, 10 bp, synthetic construct
  source 1..10: mol_type = other DNA
gcaattactc

SEQ ID NO: 1272 - DNA, 10 bp, synthetic construct
  source 1..10: mol_type = other DNA
gaggagttcg

SEQ ID NO: 1273 - DNA, 10 bp, synthetic construct
  source 1..10: mol_type = other DNA
tagtactatc

SEQ ID NO: 1274 - DNA, 10 bp, synthetic construct
  source 1..10: mol_type = other DNA
cgacttggcg

SEQ ID NO: 1275 - DNA, 10 bp, synthetic construct
  source 1..10: mol_type = other DNA
ctattcggcc

SEQ ID NO: 1276 - DNA, 10 bp, synthetic construct
  source 1..10: mol_type = other DNA
cttccaagaa

SEQ ID NO: 1277 - DNA, 10 bp, synthetic construct
  source 1..10: mol_type = other DNA
cgatcctgga

SEQ ID NO: 1278 - DNA, 10 bp, synthetic construct
  source 1..10: mol_type = other DNA
tattccgtta

SEQ ID NO: 1279 - DNA, 10 bp, synthetic construct
  source 1..10: mol_type = other DNA
ttagtacgcc

SEQ ID NO: 1280 - DNA, 10 bp, synthetic construct
  source 1..10: mol_type = other DNA
tcgtagcatc

SEQ ID NO: 1281 - DNA, 10 bp, synthetic construct
  source 1..10: mol_type = other DNA
gtattaagtt

SEQ ID NO: 1282 - DNA, 10 bp, synthetic construct
  source 1..10: mol_type = other DNA
cattctagaa

SEQ ID NO: 1283 - DNA, 10 bp, synthetic construct
  source 1..10: mol_type = other DNA
ggtagatcaa

SEQ ID NO: 1284 - DNA, 10 bp, synthetic construct
  source 1..10: mol_type = other DNA
atctcctacg

SEQ ID NO: 1285 - DNA, 10 bp, synthetic construct
  source 1..10: mol_type = other DNA
acgaagaagc

SEQ ID NO: 1286 - DNA, 10 bp, synthetic construct
  source 1..10: mol_type = other DNA
ccgatcagcc

SEQ ID NO: 1287 - DNA, 10 bp, synthetic construct
  source 1..10: mol_type = other DNA
ctggcttcct

SEQ ID NO: 1288 - DNA, 10 bp, synthetic construct
  source 1..10: mol_type = other DNA
ttcataatgg

SEQ ID NO: 1289 - DNA, 10 bp, synthetic construct
  source 1..10: mol_type = other DNA
gttgaacgca

SEQ ID NO: 1290 - DNA, 10 bp, synthetic construct
  source 1..10: mol_type = other DNA
taacggctga

SEQ ID NO: 1291 - DNA, 10 bp, synthetic construct
  source 1..10: mol_type = other DNA
gaagtccgtc

SEQ ID NO: 1292 - DNA, 10 bp, synthetic construct
  source 1..10: mol_type = other DNA
atacgccgcc

SEQ ID NO: 1293 - DNA, 10 bp, synthetic construct
  source 1..10: mol_type = other DNA
actggatgct

SEQ ID NO: 1294 - DNA, 10 bp, synthetic construct
  source 1..10: mol_type = other DNA
gagcgaatat

SEQ ID NO: 1295 - DNA, 10 bp, synthetic construct
  source 1..10: mol_type = other DNA
tatatgaagt

SEQ ID NO: 1296 - DNA, 10 bp, synthetic construct
  source 1..10: mol_type = other DNA
acgataccgg

SEQ ID NO: 1297 - DNA, 10 bp, synthetic construct
  source 1..10: mol_type = other DNA
tcataccgct

SEQ ID NO: 1298 - DNA, 10 bp, synthetic construct
  source 1..10: mol_type = other DNA
cgctaaccgt

SEQ ID NO: 1299 - DNA, 10 bp, synthetic construct
  source 1..10: mol_type = other DNA
cgcatccatc

SEQ ID NO: 1300 - DNA, 10 bp, synthetic construct
  source 1..10: mol_type = other DNA
cgtcttcctt

SEQ ID NO: 1301 - DNA, 10 bp, synthetic construct
  source 1..10: mol_type = other DNA
aacgctatta

SEQ ID NO: 1302 - DNA, 10 bp, synthetic construct
  source 1..10: mol_type = other DNA
taagataggt

SEQ ID NO: 1303 - DNA, 10 bp, synthetic construct
  source 1..10: mol_type = other DNA
tgataatagc

SEQ ID NO: 1304 - DNA, 10 bp, synthetic construct
  source 1..10: mol_type = other DNA
ggcctccatt

SEQ ID NO: 1305 - DNA, 10 bp, synthetic construct
  source 1..10: mol_type = other DNA
tgccgccgat

SEQ ID NO: 1306 - DNA, 10 bp, synthetic construct
  source 1..10: mol_type = other DNA
tgcctattat

SEQ ID NO: 1307 - DNA, 10 bp, synthetic construct
  source 1..10: mol_type = other DNA
ctgatacgtc

SEQ ID NO: 1308 - DNA, 10 bp, synthetic construct
  source 1..10: mol_type = other DNA
gacctggaat

SEQ ID NO: 1309 - DNA, 10 bp, synthetic construct
  source 1..10: mol_type = other DNA
tcagatcgga

SEQ ID NO: 1310 - DNA, 10 bp, synthetic construct
  source 1..10: mol_type = other DNA
gaggcggaat

SEQ ID NO: 1311 - DNA, 10 bp, synthetic construct
  source 1..10: mol_type = other DNA
cagcgcatcc

SEQ ID NO: 1312 - DNA, 10 bp, synthetic construct
  source 1..10: mol_type = other DNA
aatgccaaga

SEQ ID NO: 1313 - DNA, 10 bp, synthetic construct
  source 1..10: mol_type = other DNA
tggtctacgt

SEQ ID NO: 1314 - DNA, 10 bp, synthetic construct
  source 1..10: mol_type = other DNA
ggtcgccgct

SEQ ID NO: 1315 - DNA, 10 bp, synthetic construct
  source 1..10: mol_type = other DNA
agcaagtagt

SEQ ID NO: 1316 - DNA, 10 bp, synthetic construct
  source 1..10: mol_type = other DNA
aagaagttca

SEQ ID NO: 1317 - DNA, 10 bp, synthetic construct
  source 1..10: mol_type = other DNA
cggcgctggc

SEQ ID NO: 1318 - DNA, 10 bp, synthetic construct
  source 1..10: mol_type = other DNA
tcgtcaactt

SEQ ID NO: 1319 - DNA, 10 bp, synthetic construct
  source 1..10: mol_type = other DNA
caacttggat

SEQ ID NO: 1320 - DNA, 10 bp, synthetic construct
  source 1..10: mol_type = other DNA
ttggagctca

SEQ ID NO: 1321 - DNA, 10 bp, synthetic construct
  source 1..10: mol_type = other DNA
cttagttcaa

SEQ ID NO: 1322 - DNA, 10 bp, synthetic construct
  source 1..10: mol_type = other DNA
ttgaattata

SEQ ID NO: 1323 - DNA, 10 bp, synthetic construct
  source 1..10: mol_type = other DNA
cttcagcttc

SEQ ID NO: 1324 - DNA, 10 bp, synthetic construct
  source 1..10: mol_type = other DNA
gtataccgaa

SEQ ID NO: 1325 - DNA, 10 bp, synthetic construct
  source 1..10: mol_type = other DNA
ggatataata

SEQ ID NO: 1326 - DNA, 10 bp, synthetic construct
  source 1..10: mol_type = other DNA
gaatcgacgt

SEQ ID NO: 1327 - DNA, 10 bp, synthetic construct
  source 1..10: mol_type = other DNA
tgaacggtaa

SEQ ID NO: 1328 - DNA, 10 bp, synthetic construct
  source 1..10: mol_type = other DNA
aagtcgcgcg

SEQ ID NO: 1329 - DNA, 10 bp, synthetic construct
  source 1..10: mol_type = other DNA
tccgcctact

SEQ ID NO: 1330 - DNA, 10 bp, synthetic construct
  source 1..10: mol_type = other DNA
ttaatagttc

SEQ ID NO: 1331 - DNA, 10 bp, synthetic construct
  source 1..10: mol_type = other DNA
caaccggatc

SEQ ID NO: 1332 - DNA, 10 bp, synthetic construct
  source 1..10: mol_type = other DNA
ttagagcaac

SEQ ID NO: 1333 - DNA, 10 bp, synthetic construct
  source 1..10: mol_type = other DNA
cgtcattcca

SEQ ID NO: 1334 - DNA, 10 bp, synthetic construct
  source 1..10: mol_type = other DNA
taggaaggca

SEQ ID NO: 1335 - DNA, 10 bp, synthetic construct
  source 1..10: mol_type = other DNA
ttggcctata

SEQ ID NO: 1336 - DNA, 10 bp, synthetic construct
  source 1..10: mol_type = other DNA
gcgtctattc

SEQ ID NO: 1337 - DNA, 10 bp, synthetic construct
  source 1..10: mol_type = other DNA
cagagtagac

SEQ ID NO: 1338 - DNA, 10 bp, synthetic construct
  source 1..10: mol_type = other DNA
atgccggacg

SEQ ID NO: 1339 - DNA, 10 bp, synthetic construct
  source 1..10: mol_type = other DNA
tattcgatct

SEQ ID NO: 1340 - DNA, 10 bp, synthetic construct
  source 1..10: mol_type = other DNA
atggatccga

SEQ ID NO: 1341 - DNA, 10 bp, synthetic construct
  source 1..10: mol_type = other DNA
ataatgcatt

SEQ ID NO: 1342 - DNA, 10 bp, synthetic construct
  source 1..10: mol_type = other DNA
aagtagacta

SEQ ID NO: 1343 - DNA, 10 bp, synthetic construct
  source 1..10: mol_type = other DNA
atggaagcat

SEQ ID NO: 1344 - DNA, 10 bp, synthetic construct
  source 1..10: mol_type = other DNA
tggatcaggc

SEQ ID NO: 1345 - DNA, 10 bp, synthetic construct
  source 1..10: mol_type = other DNA
gttacttagc

SEQ ID NO: 1346 - DNA, 10 bp, synthetic construct
  source 1..10: mol_type = other DNA
accgccgcaa

SEQ ID NO: 1347 - DNA, 10 bp, synthetic construct
  source 1..10: mol_type = other DNA
ctcaagtcct

SEQ ID NO: 1348 - DNA, 10 bp, synthetic construct
  source 1..10: mol_type = other DNA
cggtcgacta

SEQ ID NO: 1349 - DNA, 10 bp, synthetic construct
  source 1..10: mol_type = other DNA
ttcgccgtaa

SEQ ID NO: 1350 - DNA, 10 bp, synthetic construct
  source 1..10: mol_type = other DNA
gctccgcttg

SEQ ID NO: 1351 - DNA, 10 bp, synthetic construct
  source 1..10: mol_type = other DNA
acttaagata

SEQ ID NO: 1352 - DNA, 10 bp, synthetic construct
  source 1..10: mol_type = other DNA
ggcatggcca

SEQ ID NO: 1353 - DNA, 10 bp, synthetic construct
  source 1..10: mol_type = other DNA
cttcggtata

SEQ ID NO: 1354 - DNA, 10 bp, synthetic construct
  source 1..10: mol_type = other DNA
gagattcgcc

SEQ ID NO: 1355 - DNA, 10 bp, synthetic construct
  source 1..10: mol_type = other DNA
ctaggccgtt

SEQ ID NO: 1356 - DNA, 10 bp, synthetic construct
  source 1..10: mol_type = other DNA
ggccaacgat

SEQ ID NO: 1357 - DNA, 10 bp, synthetic construct
  source 1..10: mol_type = other DNA
acggaacctg

SEQ ID NO: 1358 - DNA, 10 bp, synthetic construct
  source 1..10: mol_type = other DNA
tgattctcgt

SEQ ID NO: 1359 - DNA, 10 bp, synthetic construct
  source 1..10: mol_type = other DNA
ttgcgtcaac

SEQ ID NO: 1360 - DNA, 10 bp, synthetic construct
  source 1..10: mol_type = other DNA
gaatgcaacc

SEQ ID NO: 1361 - DNA, 10 bp, synthetic construct
  source 1..10: mol_type = other DNA
tgcggttcag

SEQ ID NO: 1362 - DNA, 10 bp, synthetic construct
  source 1..10: mol_type = other DNA
ttggccaacc

SEQ ID NO: 1363 - DNA, 10 bp, synthetic construct
  source 1..10: mol_type = other DNA
ttggttaagc

SEQ ID NO: 1364 - DNA, 10 bp, synthetic construct
  source 1..10: mol_type = other DNA
cttaagttcg

SEQ ID NO: 1365 - DNA, 10 bp, synthetic construct
  source 1..10: mol_type = other DNA
gtcctcagaa

SEQ ID NO: 1366 - DNA, 10 bp, synthetic construct
  source 1..10: mol_type = other DNA
ggagtcgtct

SEQ ID NO: 1367 - DNA, 10 bp, synthetic construct
  source 1..10: mol_type = other DNA
ggtacctcta

SEQ ID NO: 1368 - DNA, 10 bp, synthetic construct
  source 1..10: mol_type = other DNA
gatcgctgag

SEQ ID NO: 1369 - DNA, 10 bp, synthetic construct
  source 1..10: mol_type = other DNA
agagtactcc

SEQ ID NO: 1370 - DNA, 10 bp, synthetic construct
  source 1..10: mol_type = other DNA
tcattctatt

SEQ ID NO: 1371 - DNA, 10 bp, synthetic construct
  source 1..10: mol_type = other DNA
gttactacca

SEQ ID NO: 1372 - DNA, 10 bp, synthetic construct
  source 1..10: mol_type = other DNA
ccagctcgcc

SEQ ID NO: 1373 - DNA, 10 bp, synthetic construct
  source 1..10: mol_type = other DNA
cgccggtatg

SEQ ID NO: 1374 - DNA, 10 bp, synthetic construct
  source 1..10: mol_type = other DNA
ttaattcgta

SEQ ID NO: 1375 - DNA, 10 bp, synthetic construct
  source 1..10: mol_type = other DNA
gaaggctcca

SEQ ID NO: 1376 - DNA, 10 bp, synthetic construct
  source 1..10: mol_type = other DNA
gagacgtacg

SEQ ID NO: 1377 - DNA, 10 bp, synthetic construct
  source 1..10: mol_type = other DNA
gaagagcctc

SEQ ID NO: 1378 - DNA, 10 bp, synthetic construct
  source 1..10: mol_type = other DNA
ccgatgcata

SEQ ID NO: 1379 - DNA, 10 bp, synthetic construct
  source 1..10: mol_type = other DNA
gtaatggtat

SEQ ID NO: 1380 - DNA, 10 bp, synthetic construct
  source 1..10: mol_type = other DNA
ttctatctca

SEQ ID NO: 1381 - DNA, 10 bp, synthetic construct
  source 1..10: mol_type = other DNA
gcagcagcta

SEQ ID NO: 1382 - DNA, 10 bp, synthetic construct
  source 1..10: mol_type = other DNA
ttgctcgatt

SEQ ID NO: 1383 - DNA, 10 bp, synthetic construct
  source 1..10: mol_type = other DNA
cctcatcggc

SEQ ID NO: 1384 - DNA, 10 bp, synthetic construct
  source 1..10: mol_type = other DNA
acttcagcaa

SEQ ID NO: 1385 - DNA, 10 bp, synthetic construct
  source 1..10: mol_type = other DNA
aggtcatcct

SEQ ID NO: 1386 - DNA, 10 bp, synthetic construct
  source 1..10: mol_type = other DNA
aacgcgtcag

SEQ ID NO: 1387 - DNA, 10 bp, synthetic construct
  source 1..10: mol_type = other DNA
ctatgcttac

SEQ ID NO: 1388 - DNA, 10 bp, synthetic construct
  source 1..10: mol_type = other DNA
gttgccgttc

SEQ ID NO: 1389 - DNA, 10 bp, synthetic construct
  source 1..10: mol_type = other DNA
gcttaccgcc

SEQ ID NO: 1390 - DNA, 10 bp, synthetic construct
  source 1..10: mol_type = other DNA
tggcaagtca

SEQ ID NO: 1391 - DNA, 10 bp, synthetic construct
  source 1..10: mol_type = other DNA
catcgaagga

SEQ ID NO: 1392 - DNA, 10 bp, synthetic construct
  source 1..10: mol_type = other DNA
agaatcctcg

SEQ ID NO: 1393 - DNA, 10 bp, synthetic construct
  source 1..10: mol_type = other DNA
gcaatcggtt

SEQ ID NO: 1394 - DNA, 10 bp, synthetic construct
  source 1..10: mol_type = other DNA
cctaagattc

SEQ ID NO: 1395 - DNA, 10 bp, synthetic construct
  source 1..10: mol_type = other DNA
cctgcgcgcg

SEQ ID NO: 1396 - DNA, 10 bp, synthetic construct
  source 1..10: mol_type = other DNA
atcagcgcga

SEQ ID NO: 1397 - DNA, 10 bp, synthetic construct
  source 1..10: mol_type = other DNA
gtacgattct

SEQ ID NO: 1398 - DNA, 10 bp, synthetic construct
  source 1..10: mol_type = other DNA
ttaccttgca

SEQ ID NO: 1399 - DNA, 10 bp, synthetic construct
  source 1..10: mol_type = other DNA
ccggctcagc

SEQ ID NO: 1400 - DNA, 10 bp, synthetic construct
  source 1..10: mol_type = other DNA
ttctgcaaga

SEQ ID NO: 1401 - DNA, 10 bp, synthetic construct
  source 1..10: mol_type = other DNA
atatacgctt

SEQ ID NO: 1402 - DNA, 10 bp, synthetic construct
  source 1..10: mol_type = other DNA
ctcagcaacc

SEQ ID NO: 1403 - DNA, 10 bp, synthetic construct
  source 1..10: mol_type = other DNA
caattctagg

SEQ ID NO: 1404 - DNA, 10 bp, synthetic construct
  source 1..10: mol_type = other DNA
atcagtctcg

SEQ ID NO: 1405 - DNA, 10 bp, synthetic construct
  source 1..10: mol_type = other DNA
aatccgcaac

SEQ ID NO: 1406 - DNA, 10 bp, synthetic construct
  source 1..10: mol_type = other DNA
cggttacctt

SEQ ID NO: 1407 - DNA, 10 bp, synthetic construct
  source 1..10: mol_type = other DNA
acgttaagac

SEQ ID NO: 1408 - DNA, 10 bp, synthetic construct
  source 1..10: mol_type = other DNA
ctatccaacc

SEQ ID NO: 1409 - DNA, 10 bp, synthetic construct
  source 1..10: mol_type = other DNA
ataagcgaat

SEQ ID NO: 1410 - DNA, 10 bp, synthetic construct
  source 1..10: mol_type = other DNA
cttatatcgg

SEQ ID NO: 1411 - DNA, 10 bp, synthetic construct
  source 1..10: mol_type = other DNA
atatgacgac

SEQ ID NO: 1412 - DNA, 10 bp, synthetic construct
  source 1..10: mol_type = other DNA
ttaccgcata

SEQ ID NO: 1413 - DNA, 10 bp, synthetic construct
  source 1..10: mol_type = other DNA
attcatcgcc

SEQ ID NO: 1414 - DNA, 10 bp, synthetic construct
  source 1..10: mol_type = other DNA
agaagcagaa

SEQ ID NO: 1415 - DNA, 10 bp, synthetic construct
  source 1..10: mol_type = other DNA
gttcgtcgtt

SEQ ID NO: 1416 - DNA, 10 bp, synthetic construct
  source 1..10: mol_type = other DNA
catgcttcca

SEQ ID NO: 1417 - DNA, 10 bp, synthetic construct
  source 1..10: mol_type = other DNA
tcggtaccag

SEQ ID NO: 1418 - DNA, 10 bp, synthetic construct
  source 1..10: mol_type = other DNA
ttgagccaat

SEQ ID NO: 1419 - DNA, 10 bp, synthetic construct
  source 1..10: mol_type = other DNA
agatgactga

SEQ ID NO: 1420 - DNA, 10 bp, synthetic construct
  source 1..10: mol_type = other DNA
acgctagaag

SEQ ID NO: 1421 - DNA, 10 bp, synthetic construct
  source 1..10: mol_type = other DNA
gttcaattgc

SEQ ID NO: 1422 - DNA, 10 bp, synthetic construct
  source 1..10: mol_type = other DNA
ggaccgtcaa

SEQ ID NO: 1423 - DNA, 10 bp, synthetic construct
  source 1..10: mol_type = other DNA
cattaacgga

SEQ ID NO: 1424 - DNA, 10 bp, synthetic construct
  source 1..10: mol_type = other DNA
taagcagtcc

SEQ ID NO: 1425 - DNA, 10 bp, synthetic construct
  source 1..10: mol_type = other DNA
ccggtcagtt

SEQ ID NO: 1426 - DNA, 10 bp, synthetic construct
  source 1..10: mol_type = other DNA
ataacggact

SEQ ID NO: 1427 - DNA, 10 bp, synthetic construct
  source 1..10: mol_type = other DNA
acgagaagat

SEQ ID NO: 1428 - DNA, 10 bp, synthetic construct
  source 1..10: mol_type = other DNA
atcctcttaa

SEQ ID NO: 1429 - DNA, 10 bp, synthetic construct
  source 1..10: mol_type = other DNA
aatccaataa

SEQ ID NO: 1430 - DNA, 10 bp, synthetic construct
  source 1..10: mol_type = other DNA
ctagcaggat

SEQ ID NO: 1431 - DNA, 10 bp, synthetic construct
  source 1..10: mol_type = other DNA
tggtctcgga

SEQ ID NO: 1432 - DNA, 10 bp, synthetic construct
  source 1..10: mol_type = other DNA
ccgagtacta

SEQ ID NO: 1433 - DNA, 10 bp, synthetic construct
  source 1..10: mol_type = other DNA
gatgacgaag

SEQ ID NO: 1434 - DNA, 10 bp, synthetic construct
  source 1..10: mol_type = other DNA
ggcagtcttc

SEQ ID NO: 1435 - DNA, 10 bp, synthetic construct
  source 1..10: mol_type = other DNA
aatacgaata

SEQ ID NO: 1436 - DNA, 10 bp, synthetic construct
  source 1..10: mol_type = other DNA
acctaggaga

SEQ ID NO: 1437 - DNA, 10 bp, synthetic construct
  source 1..10: mol_type = other DNA
gaagcgccaa

SEQ ID NO: 1438 - DNA, 10 bp, synthetic construct
  source 1..10: mol_type = other DNA
cgttacgttg

SEQ ID NO: 1439 - DNA, 10 bp, synthetic construct
  source 1..10: mol_type = other DNA
gtcgcgaata

SEQ ID NO: 1440 - DNA, 10 bp, synthetic construct
  source 1..10: mol_type = other DNA
ttagagcctg

SEQ ID NO: 1441 - DNA, 10 bp, synthetic construct
  source 1..10: mol_type = other DNA
acggtcatca

SEQ ID NO: 1442 - DNA, 10 bp, synthetic construct
  source 1..10: mol_type = other DNA
acgtagcagg

SEQ ID NO: 1443 - DNA, 10 bp, synthetic construct
  source 1..10: mol_type = other DNA
cgaccgagag

SEQ ID NO: 1444 - DNA, 10 bp, synthetic construct
  source 1..10: mol_type = other DNA
aagcggttct

SEQ ID NO: 1445 - DNA, 10 bp, synthetic construct
  source 1..10: mol_type = other DNA
tcggaataac

SEQ ID NO: 1446 - DNA, 10 bp, synthetic construct
  source 1..10: mol_type = other DNA
aagttcgctg

SEQ ID NO: 1447 - DNA, 10 bp, synthetic construct
  source 1..10: mol_type = other DNA
aataatcggt

SEQ ID NO: 1448 - DNA, 10 bp, synthetic construct
  source 1..10: mol_type = other DNA
aggcgaaggc

SEQ ID NO: 1449 - DNA, 10 bp, synthetic construct
  source 1..10: mol_type = other DNA
aagccgccgc

SEQ ID NO: 1450 - DNA, 10 bp, synthetic construct
  source 1..10: mol_type = other DNA
tcggccgatg

SEQ ID NO: 1451 - DNA, 10 bp, synthetic construct
  source 1..10: mol_type = other DNA
agcgactgct

SEQ ID NO: 1452 - DNA, 10 bp, synthetic construct
  source 1..10: mol_type = other DNA
cttaatgagc

SEQ ID NO: 1453 - DNA, 10 bp, synthetic construct
  source 1..10: mol_type = other DNA
aattcctctc

SEQ ID NO: 1454 - DNA, 10 bp, synthetic construct
  source 1..10: mol_type = other DNA
gctggtctcc

SEQ ID NO: 1455 - DNA, 10 bp, synthetic construct
  source 1..10: mol_type = other DNA
agtattgcta

SEQ ID NO: 1456 - DNA, 10 bp, synthetic construct
  source 1..10: mol_type = other DNA
tctaggataa

SEQ ID NO: 1457 - DNA, 10 bp, synthetic construct
  source 1..10: mol_type = other DNA
ggtcctgcaa

SEQ ID NO: 1458 - DNA, 10 bp, synthetic construct
  source 1..10: mol_type = other DNA
cgcttcaatt

SEQ ID NO: 1459 - DNA, 10 bp, synthetic construct
  source 1..10: mol_type = other DNA
ggattattat

SEQ ID NO: 1460 - DNA, 10 bp, synthetic construct
  source 1..10: mol_type = other DNA
tccggctgat

SEQ ID NO: 1461 - DNA, 10 bp, synthetic construct
  source 1..10: mol_type = other DNA
ccgcctcgtt

SEQ ID NO: 1462 - DNA, 10 bp, synthetic construct
  source 1..10: mol_type = other DNA
ttataatcaa

SEQ ID NO: 1463 - DNA, 10 bp, synthetic construct
  source 1..10: mol_type = other DNA
ccattgaacg

SEQ ID NO: 1464 - DNA, 10 bp, synthetic construct
  source 1..10: mol_type = other DNA
actccaacgg

SEQ ID NO: 1465 - DNA, 10 bp, synthetic construct
  source 1..10: mol_type = other DNA
acctcctgaa

SEQ ID NO: 1466 - DNA, 10 bp, synthetic construct
  source 1..10: mol_type = other DNA
agaggccggc

SEQ ID NO: 1467 - DNA, 10 bp, synthetic construct
  source 1..10: mol_type = other DNA
ctgcctcttc

SEQ ID NO: 1468 - DNA, 10 bp, synthetic construct
  source 1..10: mol_type = other DNA
cagtatcctt

SEQ ID NO: 1469 - DNA, 10 bp, synthetic construct
  source 1..10: mol_type = other DNA
gtcaactagc

SEQ ID NO: 1470 - DNA, 10 bp, synthetic construct
  source 1..10: mol_type = other DNA
tgacgcagtc

SEQ ID NO: 1471 - DNA, 10 bp, synthetic construct
  source 1..10: mol_type = other DNA
gtcaatacga

SEQ ID NO: 1472 - DNA, 10 bp, synthetic construct
  source 1..10: mol_type = other DNA
tgaacttcga

SEQ ID NO: 1473 - DNA, 10 bp, synthetic construct
  source 1..10: mol_type = other DNA
cgtaccaacg

SEQ ID NO: 1474 - DNA, 10 bp, synthetic construct
  source 1..10: mol_type = other DNA
agagatgaat

SEQ ID NO: 1475 - DNA, 10 bp, synthetic construct
  source 1..10: mol_type = other DNA
tattccaatt

SEQ ID NO: 1476 - DNA, 10 bp, synthetic construct
  source 1..10: mol_type = other DNA
ggatgcgatt

SEQ ID NO: 1477 - DNA, 10 bp, synthetic construct
  source 1..10: mol_type = other DNA
gtaaccaggt

SEQ ID NO: 1478 - DNA, 10 bp, synthetic construct
  source 1..10: mol_type = other DNA
cctcgtcata

SEQ ID NO: 1479 - DNA, 10 bp, synthetic construct
  source 1..10: mol_type = other DNA
aatggtctta

SEQ ID NO: 1480 - DNA, 10 bp, synthetic construct
  source 1..10: mol_type = other DNA
atgaatgcct

SEQ ID NO: 1481 - DNA, 10 bp, synthetic construct
  source 1..10: mol_type = other DNA
gtccgtagat

SEQ ID NO: 1482 - DNA, 10 bp, synthetic construct
  source 1..10: mol_type = other DNA
ccatcctagt

SEQ ID NO: 1483 - DNA, 10 bp, synthetic construct
  source 1..10: mol_type = other DNA
tggttcctac

SEQ ID NO: 1484 - DNA, 10 bp, synthetic construct
  source 1..10: mol_type = other DNA
gcgccttccg

SEQ ID NO: 1485 - DNA, 10 bp, synthetic construct
  source 1..10: mol_type = other DNA
cgtactacgc

SEQ ID NO: 1486 - DNA, 10 bp, synthetic construct
  source 1..10: mol_type = other DNA
ggccgcggtt

SEQ ID NO: 1487 - DNA, 10 bp, synthetic construct
  source 1..10: mol_type = other DNA
tggatagttg

SEQ ID NO: 1488 - DNA, 10 bp, synthetic construct
  source 1..10: mol_type = other DNA
cggcgccagg

SEQ ID NO: 1489 - DNA, 10 bp, synthetic construct
  source 1..10: mol_type = other DNA
caagctcagg

SEQ ID NO: 1490 - DNA, 10 bp, synthetic construct
  source 1..10: mol_type = other DNA
atcatccttc

SEQ ID NO: 1491 - DNA, 10 bp, synthetic construct
  source 1..10: mol_type = other DNA
cctccggagt

SEQ ID NO: 1492 - DNA, 10 bp, synthetic construct
  source 1..10: mol_type = other DNA
ccattgctgg

SEQ ID NO: 1493 - DNA, 10 bp, synthetic construct
  source 1..10: mol_type = other DNA
tattcgcagt

SEQ ID NO: 1494 - DNA, 10 bp, synthetic construct
  source 1..10: mol_type = other DNA
ccggttaagt

SEQ ID NO: 1495 - DNA, 10 bp, synthetic construct
  source 1..10: mol_type = other DNA
atattctacc

SEQ ID NO: 1496 - DNA, 10 bp, synthetic construct
  source 1..10: mol_type = other DNA
tacggatcgt

SEQ ID NO: 1497 - DNA, 10 bp, synthetic construct
  source 1..10: mol_type = other DNA
ttctctccag

SEQ ID NO: 1498 - DNA, 10 bp, synthetic construct
  source 1..10: mol_type = other DNA
ccaagagcaa

SEQ ID NO: 1499 - DNA, 10 bp, synthetic construct
  source 1..10: mol_type = other DNA
ttggttcgag

SEQ ID NO: 1500 - DNA, 10 bp, synthetic construct
  source 1..10: mol_type = other DNA
aacggattac

SEQ ID NO: 1501 - DNA, 10 bp, synthetic construct
  source 1..10: mol_type = other DNA
catcttcaga

SEQ ID NO: 1502 - DNA, 10 bp, synthetic construct
  source 1..10: mol_type = other DNA
ttgaacctcc

SEQ ID NO: 1503 - DNA, 10 bp, synthetic construct
  source 1..10: mol_type = other DNA
ggaattccaa

SEQ ID NO: 1504 - DNA, 10 bp, synthetic construct
  source 1..10: mol_type = other DNA
ataggtccaa

SEQ ID NO: 1505 - DNA, 10 bp, synthetic construct
  source 1..10: mol_type = other DNA
gccatggtac

SEQ ID NO: 1506 - DNA, 10 bp, synthetic construct
  source 1..10: mol_type = other DNA
gagctcttca

SEQ ID NO: 1507 - DNA, 10 bp, synthetic construct
  source 1..10: mol_type = other DNA
ccgaggcaac

SEQ ID NO: 1508 - DNA, 10 bp, synthetic construct
  source 1..10: mol_type = other DNA
gtctctagtt

SEQ ID NO: 1509 - DNA, 10 bp, synthetic construct
  source 1..10: mol_type = other DNA
gctggttata

SEQ ID NO: 1510 - DNA, 10 bp, synthetic construct
  source 1..10: mol_type = other DNA
tcgtaggtca

SEQ ID NO: 1511 - DNA, 10 bp, synthetic construct
  source 1..10: mol_type = other DNA
aactcagacg

SEQ ID NO: 1512 - DNA, 10 bp, synthetic construct
  source 1..10: mol_type = other DNA
tgctgccgga

SEQ ID NO: 1513 - DNA, 10 bp, synthetic construct
  source 1..10: mol_type = other DNA
tggaggcaag

SEQ ID NO: 1514 - DNA, 10 bp, synthetic construct
  source 1..10: mol_type = other DNA
actgatgcga

SEQ ID NO: 1515 - DNA, 10 bp, synthetic construct
  source 1..10: mol_type = other DNA
acgactcctc

SEQ ID NO: 1516 - DNA, 10 bp, synthetic construct
  source 1..10: mol_type = other DNA
tggcagcgaa

SEQ ID NO: 1517 - DNA, 10 bp, synthetic construct
  source 1..10: mol_type = other DNA
ccgatactct

SEQ ID NO: 1518 - DNA, 10 bp, synthetic construct
  source 1..10: mol_type = other DNA
caatataggc

SEQ ID NO: 1519 - DNA, 10 bp, synthetic construct
  source 1..10: mol_type = other DNA
accggccgac

SEQ ID NO: 1520 - DNA, 10 bp, synthetic construct
  source 1..10: mol_type = other DNA
aataaggctc

SEQ ID NO: 1521 - DNA, 10 bp, synthetic construct
  source 1..10: mol_type = other DNA
catcatagca

SEQ ID NO: 1522 - DNA, 10 bp, synthetic construct
  source 1..10: mol_type = other DNA
gatgatccat

SEQ ID NO: 1523 - DNA, 10 bp, synthetic construct
  source 1..10: mol_type = other DNA
atggcaatac

SEQ ID NO: 1524 - DNA, 10 bp, synthetic construct
  source 1..10: mol_type = other DNA
accagaacca

SEQ ID NO: 1525 - DNA, 10 bp, synthetic construct
  source 1..10: mol_type = other DNA
ggttcgacct

SEQ ID NO: 1526 - DNA, 10 bp, synthetic construct
  source 1..10: mol_type = other DNA
cttggacgga

SEQ ID NO: 1527 - DNA, 10 bp, synthetic construct
  source 1..10: mol_type = other DNA
cggtctcata

SEQ ID NO: 1528 - DNA, 10 bp, synthetic construct
  source 1..10: mol_type = other DNA
aatcagagcc

SEQ ID NO: 1529 - DNA, 10 bp, synthetic construct
  source 1..10: mol_type = other DNA
cctgaatact

SEQ ID NO: 1530 - DNA, 10 bp, synthetic construct
  source 1..10: mol_type = other DNA
cttggagact

SEQ ID NO: 1531 - DNA, 10 bp, synthetic construct
  source 1..10: mol_type = other DNA
aagaccttac

SEQ ID NO: 1532 - DNA, 10 bp, synthetic construct
  source 1..10: mol_type = other DNA
gcgagcgctc

SEQ ID NO: 1533 - DNA, 10 bp, synthetic construct
  source 1..10: mol_type = other DNA
tcgcaagacg

SEQ ID NO: 1534 - DNA, 10 bp, synthetic construct
  source 1..10: mol_type = other DNA
caatctcgga

SEQ ID NO: 1535 - DNA, 10 bp, synthetic construct
  source 1..10: mol_type = other DNA
tcgacctacc

SEQ ID NO: 1536 - DNA, 10 bp, synthetic construct
  source 1..10: mol_type = other DNA
ttataggcat

SEQ ID NO: 1537 - DNA, 49 bp, synthetic construct
  source 1..49: mol_type = other DNA
caagcagaagacggcatacgagatccgaatccgagtctcgtgggctcgg

SEQ ID NO: 1538 - DNA, 49 bp, synthetic construct
  source 1..49: mol_type = other DNA
caagcagaagacggcatacgagatataagccggagtctcgtgggctcgg

SEQ ID NO: 1539 - DNA, 49 bp, synthetic construct
  source 1..49: mol_type = other DNA
caagcagaagacggcatacgagatccggcggcgagtctcgtgggctcgg

SEQ ID NO: 1540 - DNA, 49 bp, synthetic construct
  source 1..49: mol_type = other DNA
caagcagaagacggcatacgagatggcttgccaagtctcgtgggctcgg

SEQ ID NO: 1541 - DNA, 49 bp, synthetic construct
  source 1..49: mol_type = other DNA
caagcagaagacggcatacgagatccgctagctggtctcgtgggctcgg

SEQ ID NO: 1542 - DNA, 49 bp, synthetic construct
  source 1..49: mol_type = other DNA
caagcagaagacggcatacgagatcttatcctacgtctcgtgggctcgg

SEQ ID NO: 1543 - DNA, 49 bp, synthetic construct
  source 1..49: mol_type = other DNA
caagcagaagacggcatacgagattgagctacttgtctcgtgggctcgg

SEQ ID NO: 1544 - DNA, 49 bp, synthetic construct
  source 1..49: mol_type = other DNA
caagcagaagacggcatacgagattcaggacttagtctcgtgggctcgg

SEQ ID NO: 1545 - DNA, 49 bp, synthetic construct
  source 1..49: mol_type = other DNA
caagcagaagacggcatacgagatccgcagccgcgtctcgtgggctcgg

SEQ ID NO: 1546 - DNA, 49 bp, synthetic construct
  source 1..49: mol_type = other DNA
caagcagaagacggcatacgagattgcgcctggtgtctcgtgggctcgg

SEQ ID NO: 1547 - DNA, 49 bp, synthetic construct
  source 1..49: mol_type = other DNA
caagcagaagacggcatacgagataatcatacgggtctcgtgggctcgg

SEQ ID NO: 1548 - DNA, 49 bp, synthetic construct
  source 1..49: mol_type = other DNA
caagcagaagacggcatacgagatcgccaatcaagtctcgtgggctcgg

SEQ ID NO: 1549 - DNA, 49 bp, synthetic construct
  source 1..49: mol_type = other DNA
caagcagaagacggcatacgagatcaaggcttaggtctcgtgggctcgg

SEQ ID NO: 1550 - DNA, 49 bp, synthetic construct
  source 1..49: mol_type = other DNA
caagcagaagacggcatacgagatgcgctcgacggtctcgtgggctcgg

SEQ ID NO: 1551 - DNA, 49 bp, synthetic construct
  source 1..49: mol_type = other DNA
caagcagaagacggcatacgagattccagcaatagtctcgtgggctcgg

SEQ ID NO: 1552 - DNA, 49 bp, synthetic construct
  source 1..49: mol_type = other DNA
caagcagaagacggcatacgagatcatgagaactgtctcgtgggctcgg

SEQ ID NO: 1553 - DNA, 49 bp, synthetic construct
  source 1..49: mol_type = other DNA
caagcagaagacggcatacgagataacgtaatctgtctcgtgggctcgg

SEQ ID NO: 1554 - DNA, 49 bp, synthetic construct
  source 1..49: mol_type = other DNA
caagcagaagacggcatacgagatattctcctctgtctcgtgggctcgg

SEQ ID NO: 1555 - DNA, 49 bp, synthetic construct
  source 1..49: mol_type = other DNA
caagcagaagacggcatacgagattctgcgcgttgtctcgtgggctcgg

SEQ ID NO: 1556 - DNA, 49 bp, synthetic construct
  source 1..49: mol_type = other DNA
caagcagaagacggcatacgagatgctcatatgcgtctcgtgggctcgg

SEQ ID NO: 1557 - DNA, 49 bp, synthetic construct
  source 1..49: mol_type = other DNA
caagcagaagacggcatacgagatagcggtaacggtctcgtgggctcgg

SEQ ID NO: 1558 - DNA, 49 bp, synthetic construct
  source 1..49: mol_type = other DNA
caagcagaagacggcatacgagataatgaatagtgtctcgtgggctcgg

SEQ ID NO: 1559 - DNA, 49 bp, synthetic construct
  source 1..49: mol_type = other DNA
caagcagaagacggcatacgagatccgtatctgggtctcgtgggctcgg

SEQ ID NO: 1560 - DNA, 49 bp, synthetic construct
  source 1..49: mol_type = other DNA
caagcagaagacggcatacgagatccttagtctggtctcgtgggctcgg

SEQ ID NO: 1561 - DNA, 49 bp, synthetic construct
  source 1..49: mol_type = other DNA
caagcagaagacggcatacgagatacctagttaggtctcgtgggctcgg

SEQ ID NO: 1562 - DNA, 49 bp, synthetic construct
  source 1..49: mol_type = other DNA
caagcagaagacggcatacgagatataggagtacgtctcgtgggctcgg

SEQ ID NO: 1563 - DNA, 49 bp, synthetic construct
  source 1..49: mol_type = other DNA
caagcagaagacggcatacgagatctacgacgaggtctcgtgggctcgg

SEQ ID NO: 1564 - DNA, 49 bp, synthetic construct
  source 1..49: mol_type = other DNA
caagcagaagacggcatacgagatagtcgagttcgtctcgtgggctcgg

SEQ ID NO: 1565 - DNA, 49 bp, synthetic construct
  source 1..49: mol_type = other DNA
caagcagaagacggcatacgagattggtccagtcgtctcgtgggctcgg

SEQ ID NO: 1566 - DNA, 49 bp, synthetic construct
  source 1..49: mol_type = other DNA
caagcagaagacggcatacgagatatctaagcaagtctcgtgggctcgg

SEQ ID NO: 1567 - DNA, 49 bp, synthetic construct
  source 1..49: mol_type = other DNA
caagcagaagacggcatacgagatcgaattcgttgtctcgtgggctcgg

SEQ ID NO: 1568 - DNA, 49 bp, synthetic construct
  source 1..49: mol_type = other DNA
caagcagaagacggcatacgagatcagcgatagagtctcgtgggctcgg

SEQ ID NO: 1569 - DNA, 49 bp, synthetic construct
  source 1..49: mol_type = other DNA
caagcagaagacggcatacgagatggtcgctatggtctcgtgggctcgg

SEQ ID NO: 1570 - DNA, 49 bp, synthetic construct
  source 1..49: mol_type = other DNA
caagcagaagacggcatacgagatatccgttagcgtctcgtgggctcgg

SEQ ID NO: 1571 - DNA, 49 bp, synthetic construct
  source 1..49: mol_type = other DNA
caagcagaagacggcatacgagattcgcaattaggtctcgtgggctcgg

SEQ ID NO: 1572 - DNA, 49 bp, synthetic construct
  source 1..49: mol_type = other DNA
caagcagaagacggcatacgagatggctggctaggtctcgtgggctcgg

SEQ ID NO: 1573 - DNA, 49 bp, synthetic construct
  source 1..49: mol_type = other DNA
caagcagaagacggcatacgagatacggtcttgcgtctcgtgggctcgg

SEQ ID NO: 1574 - DNA, 49 bp, synthetic construct
  source 1..49: mol_type = other DNA
caagcagaagacggcatacgagatgctccattcggtctcgtgggctcgg

SEQ ID NO: 1575 - DNA, 49 bp, synthetic construct
  source 1..49: mol_type = other DNA
caagcagaagacggcatacgagatacgataagcggtctcgtgggctcgg

SEQ ID NO: 1576 - DNA, 49 bp, synthetic construct
  source 1..49: mol_type = other DNA
caagcagaagacggcatacgagataccatagcgcgtctcgtgggctcgg

SEQ ID NO: 1577 - DNA, 49 bp, synthetic construct
  source 1..49: mol_type = other DNA
caagcagaagacggcatacgagatctcttagcgggtctcgtgggctcgg

SEQ ID NO: 1578 - DNA, 49 bp, synthetic construct
  source 1..49: mol_type = other DNA
caagcagaagacggcatacgagattgattcaactgtctcgtgggctcgg

SEQ ID NO: 1579 - DNA, 49 bp, synthetic construct
  source 1..49: mol_type = other DNA
caagcagaagacggcatacgagattatggccgcggtctcgtgggctcgg

SEQ ID NO: 1580 - DNA, 49 bp, synthetic construct
  source 1..49: mol_type = other DNA
caagcagaagacggcatacgagatagaggtcgcagtctcgtgggctcgg

SEQ ID NO: 1581 - DNA, 49 bp, synthetic construct
  source 1..49: mol_type = other DNA
caagcagaagacggcatacgagataggagattgagtctcgtgggctcgg

SEQ ID NO: 1582 - DNA, 49 bp, synthetic construct
  source 1..49: mol_type = other DNA
caagcagaagacggcatacgagatggctatataggtctcgtgggctcgg

SEQ ID NO: 1583 - DNA, 49 bp, synthetic construct
  source 1..49: mol_type = other DNA
caagcagaagacggcatacgagattcgcgtacttgtctcgtgggctcgg

SEQ ID NO: 1584 - DNA, 49 bp, synthetic construct
  source 1..49: mol_type = other DNA
caagcagaagacggcatacgagataataataatggtctcgtgggctcgg

SEQ ID NO: 1585 - DNA, 49 bp, synthetic construct
  source 1..49: mol_type = other DNA
caagcagaagacggcatacgagatttcgttccatgtctcgtgggctcgg

SEQ ID NO: 1586 - DNA, 49 bp, synthetic construct
  source 1..49: mol_type = other DNA
caagcagaagacggcatacgagattacctaatcagtctcgtgggctcgg

SEQ ID NO: 1587 - DNA, 49 bp, synthetic construct
  source 1..49: mol_type = other DNA
caagcagaagacggcatacgagataagtaatattgtctcgtgggctcgg

SEQ ID NO: 1588 - DNA, 49 bp, synthetic construct
  source 1..49: mol_type = other DNA
caagcagaagacggcatacgagatagctaagaatgtctcgtgggctcgg

SEQ ID NO: 1589 - DNA, 49 bp, synthetic construct
  source 1..49: mol_type = other DNA
caagcagaagacggcatacgagatgtcgaggtatgtctcgtgggctcgg

SEQ ID NO: 1590 - DNA, 49 bp, synthetic construct
  source 1..49: mol_type = other DNA
caagcagaagacggcatacgagatttattagtaggtctcgtgggctcgg

SEQ ID NO: 1591 - DNA, 49 bp, synthetic construct
  source 1..49: mol_type = other DNA
caagcagaagacggcatacgagattgcgaagatcgtctcgtgggctcgg

SEQ ID NO: 1592 - DNA, 49 bp, synthetic construct
  source 1..49: mol_type = other DNA
caagcagaagacggcatacgagataactacggctgtctcgtgggctcgg

SEQ ID NO: 1593 - DNA, 49 bp, synthetic construct
  source 1..49: mol_type = other DNA
caagcagaagacggcatacgagataacggaacgcgtctcgtgggctcgg

SEQ ID NO: 1594 - DNA, 49 bp, synthetic construct
  source 1..49: mol_type = other DNA
caagcagaagacggcatacgagatgatgctacgagtctcgtgggctcgg

SEQ ID NO: 1595 - DNA, 49 bp, synthetic construct
  source 1..49: mol_type = other DNA
caagcagaagacggcatacgagatatctgccaatgtctcgtgggctcgg

SEQ ID NO: 1596 - DNA, 49 bp, synthetic construct
  source 1..49: mol_type = other DNA
caagcagaagacggcatacgagatatcgtatcaagtctcgtgggctcgg

SEQ ID NO: 1597 - DNA, 49 bp, synthetic construct
  source 1..49: mol_type = other DNA
caagcagaagacggcatacgagataacgcctctagtctcgtgggctcgg

SEQ ID NO: 1598 - DNA, 49 bp, synthetic construct
  source 1..49: mol_type = other DNA
caagcagaagacggcatacgagatacggcaaccagtctcgtgggctcgg

SEQ ID NO: 1599 - DNA, 49 bp, synthetic construct
  source 1..49: mol_type = other DNA
caagcagaagacggcatacgagatcaggctaagagtctcgtgggctcgg

SEQ ID NO: 1600 - DNA, 49 bp, synthetic construct
  source 1..49: mol_type = other DNA
caagcagaagacggcatacgagatcgcaatatcagtctcgtgggctcgg

SEQ ID NO: 1601 - DNA, 49 bp, synthetic construct
  source 1..49: mol_type = other DNA
caagcagaagacggcatacgagatttcgataaccgtctcgtgggctcgg

SEQ ID NO: 1602 - DNA, 49 bp, synthetic construct
  source 1..49: mol_type = other DNA
caagcagaagacggcatacgagataacctcaagagtctcgtgggctcgg

SEQ ID NO: 1603 - DNA, 49 bp, synthetic construct
  source 1..49: mol_type = other DNA
caagcagaagacggcatacgagatcaggcgccatgtctcgtgggctcgg

SEQ ID NO: 1604 - DNA, 49 bp, synthetic construct
  source 1..49: mol_type = other DNA
caagcagaagacggcatacgagataactattatagtctcgtgggctcgg

SEQ ID NO: 1605 - DNA, 49 bp, synthetic construct
  source 1..49: mol_type = other DNA
caagcagaagacggcatacgagataagttacctagtctcgtgggctcgg

SEQ ID NO: 1606 - DNA, 49 bp, synthetic construct
  source 1..49: mol_type = other DNA
caagcagaagacggcatacgagatcggcagaggagtctcgtgggctcgg

SEQ ID NO: 1607 - DNA, 49 bp, synthetic construct
  source 1..49: mol_type = other DNA
caagcagaagacggcatacgagatgcctcaataagtctcgtgggctcgg

SEQ ID NO: 1608 - DNA, 49 bp, synthetic construct
  source 1..49: mol_type = other DNA
caagcagaagacggcatacgagatttaacgccgtgtctcgtgggctcgg

SEQ ID NO: 1609 - DNA, 49 bp, synthetic construct
  source 1..49: mol_type = other DNA
caagcagaagacggcatacgagatcatacgatgcgtctcgtgggctcgg

SEQ ID NO: 1610 - DNA, 49 bp, synthetic construct
  source 1..49: mol_type = other DNA
caagcagaagacggcatacgagataagctgacctgtctcgtgggctcgg

SEQ ID NO: 1611 - DNA, 49 bp, synthetic construct
  source 1..49: mol_type = other DNA
caagcagaagacggcatacgagatgagtccttatgtctcgtgggctcgg

SEQ ID NO: 1612 - DNA, 49 bp, synthetic construct
  source 1..49: mol_type = other DNA
caagcagaagacggcatacgagatcctacggcaagtctcgtgggctcgg

SEQ ID NO: 1613 - DNA, 49 bp, synthetic construct
  source 1..49: mol_type = other DNA
caagcagaagacggcatacgagataatattcgaagtctcgtgggctcgg

SEQ ID NO: 1614 - DNA, 49 bp, synthetic construct
  source 1..49: mol_type = other DNA
caagcagaagacggcatacgagatttcaagaatcgtctcgtgggctcgg

SEQ ID NO: 1615 - DNA, 49 bp, synthetic construct
  source 1..49: mol_type = other DNA
caagcagaagacggcatacgagatatgctcgcaagtctcgtgggctcgg

SEQ ID NO: 1616 - DNA, 49 bp, synthetic construct
  source 1..49: mol_type = other DNA
caagcagaagacggcatacgagatggagtaagccgtctcgtgggctcgg

SEQ ID NO: 1617 - DNA, 49 bp, synthetic construct
  source 1..49: mol_type = other DNA
caagcagaagacggcatacgagatttatcgtattgtctcgtgggctcgg

SEQ ID NO: 1618 - DNA, 49 bp, synthetic construct
  source 1..49: mol_type = other DNA
caagcagaagacggcatacgagataagtctaatagtctcgtgggctcgg

SEQ ID NO: 1619 - DNA, 49 bp, synthetic construct
  source 1..49: mol_type = other DNA
caagcagaagacggcatacgagatcggcttactagtctcgtgggctcgg

SEQ ID NO: 1620 - DNA, 49 bp, synthetic construct
  source 1..49: mol_type = other DNA
caagcagaagacggcatacgagatgatatggtctgtctcgtgggctcgg

SEQ ID NO: 1621 - DNA, 49 bp, synthetic construct
  source 1..49: mol_type = other DNA
caagcagaagacggcatacgagattagtcgtccagtctcgtgggctcgg

SEQ ID NO: 1622 - DNA, 49 bp, synthetic construct
  source 1..49: mol_type = other DNA
caagcagaagacggcatacgagattagctgctacgtctcgtgggctcgg

SEQ ID NO: 1623 - DNA, 49 bp, synthetic construct
  source 1..49: mol_type = other DNA
caagcagaagacggcatacgagatctcttcaagcgtctcgtgggctcgg

SEQ ID NO: 1624 - DNA, 49 bp, synthetic construct
  source 1..49: mol_type = other DNA
caagcagaagacggcatacgagatatgaacgcgcgtctcgtgggctcgg

SEQ ID NO: 1625 - DNA, 49 bp, synthetic construct
  source 1..49: mol_type = other DNA
caagcagaagacggcatacgagatgtcgacggaagtctcgtgggctcgg

SEQ ID NO: 1626 - DNA, 49 bp, synthetic construct
  source 1..49: mol_type = other DNA
caagcagaagacggcatacgagatactaattgaggtctcgtgggctcgg

SEQ ID NO: 1627 - DNA, 49 bp, synthetic construct
  source 1..49: mol_type = other DNA
caagcagaagacggcatacgagatcttgcataatgtctcgtgggctcgg

SEQ ID NO: 1628 - DNA, 49 bp, synthetic construct
  source 1..49: mol_type = other DNA
caagcagaagacggcatacgagattccttaccaagtctcgtgggctcgg

SEQ ID NO: 1629 - DNA, 49 bp, synthetic construct
  source 1..49: mol_type = other DNA
caagcagaagacggcatacgagattgcagcctacgtctcgtgggctcgg

SEQ ID NO: 1630 - DNA, 49 bp, synthetic construct
  source 1..49: mol_type = other DNA
caagcagaagacggcatacgagatggagctgagggtctcgtgggctcgg

SEQ ID NO: 1631 - DNA, 49 bp, synthetic construct
  source 1..49: mol_type = other DNA
caagcagaagacggcatacgagatgcagcggactgtctcgtgggctcgg

SEQ ID NO: 1632 - DNA, 49 bp, synthetic construct
  source 1..49: mol_type = other DNA
caagcagaagacggcatacgagatcatcgcgctcgtctcgtgggctcgg

SEQ ID NO: 1633 - DNA, 49 bp, synthetic construct
  source 1..49: mol_type = other DNA
caagcagaagacggcatacgagatttctggcctagtctcgtgggctcgg

SEQ ID NO: 1634 - DNA, 49 bp, synthetic construct
  source 1..49: mol_type = other DNA
caagcagaagacggcatacgagataattggcgatgtctcgtgggctcgg

SEQ ID NO: 1635 - DNA, 49 bp, synthetic construct
  source 1..49: mol_type = other DNA
caagcagaagacggcatacgagataggcaaccgcgtctcgtgggctcgg

SEQ ID NO: 1636 - DNA, 49 bp, synthetic construct
  source 1..49: mol_type = other DNA
caagcagaagacggcatacgagatacgcaatgatgtctcgtgggctcgg

SEQ ID NO: 1637 - DNA, 49 bp, synthetic construct
  source 1..49: mol_type = other DNA
caagcagaagacggcatacgagatactcgttactgtctcgtgggctcgg

SEQ ID NO: 1638 - DNA, 49 bp, synthetic construct
  source 1..49: mol_type = other DNA
caagcagaagacggcatacgagatcaagtcagcagtctcgtgggctcgg

SEQ ID NO: 1639 - DNA, 49 bp, synthetic construct
  source 1..49: mol_type = other DNA
caagcagaagacggcatacgagatggtacggatagtctcgtgggctcgg

SEQ ID NO: 1640 - DNA, 49 bp, synthetic construct
  source 1..49: mol_type = other DNA
caagcagaagacggcatacgagatctcaatggtcgtctcgtgggctcgg

SEQ ID NO: 1641 - DNA, 49 bp, synthetic construct
  source 1..49: mol_type = other DNA
caagcagaagacggcatacgagatactccgaagagtctcgtgggctcgg

SEQ ID NO: 1642 - DNA, 49 bp, synthetic construct
  source 1..49: mol_type = other DNA
caagcagaagacggcatacgagataatccaaggcgtctcgtgggctcgg

SEQ ID NO: 1643 - DNA, 49 bp, synthetic construct
  source 1..49: mol_type = other DNA
caagcagaagacggcatacgagatcgtccatcgcgtctcgtgggctcgg

SEQ ID NO: 1644 - DNA, 49 bp, synthetic construct
  source 1..49: mol_type = other DNA
caagcagaagacggcatacgagatttaggtacgagtctcgtgggctcgg

SEQ ID NO: 1645 - DNA, 49 bp, synthetic construct
  source 1..49: mol_type = other DNA
caagcagaagacggcatacgagatcttaccatctgtctcgtgggctcgg

SEQ ID NO: 1646 - DNA, 49 bp, synthetic construct
  source 1..49: mol_type = other DNA
caagcagaagacggcatacgagatcgagataagagtctcgtgggctcgg

SEQ ID NO: 1647 - DNA, 49 bp, synthetic construct
  source 1..49: mol_type = other DNA
caagcagaagacggcatacgagatcgatcttctagtctcgtgggctcgg

SEQ ID NO: 1648 - DNA, 49 bp, synthetic construct
  source 1..49: mol_type = other DNA
caagcagaagacggcatacgagatgttccgatccgtctcgtgggctcgg

SEQ ID NO: 1649 - DNA, 49 bp, synthetic construct
  source 1..49: mol_type = other DNA
caagcagaagacggcatacgagatgccataagaagtctcgtgggctcgg

SEQ ID NO: 1650 - DNA, 49 bp, synthetic construct
  source 1..49: mol_type = other DNA
caagcagaagacggcatacgagatagattcataagtctcgtgggctcgg

SEQ ID NO: 1651 - DNA, 49 bp, synthetic construct
  source 1..49: mol_type = other DNA
caagcagaagacggcatacgagatcagagcgtcagtctcgtgggctcgg

SEQ ID NO: 1652 - DNA, 49 bp, synthetic construct
  source 1..49: mol_type = other DNA
caagcagaagacggcatacgagatgaggagccaggtctcgtgggctcgg

SEQ ID NO: 1653 - DNA, 49 bp, synthetic construct
  source 1..49: mol_type = other DNA
caagcagaagacggcatacgagatatgaggatccgtctcgtgggctcgg

SEQ ID NO: 1654 - DNA, 49 bp, synthetic construct
  source 1..49: mol_type = other DNA
caagcagaagacggcatacgagatcggcgctcaagtctcgtgggctcgg

SEQ ID NO: 1655 - DNA, 49 bp, synthetic construct
  source 1..49: mol_type = other DNA
caagcagaagacggcatacgagatccttacgtcagtctcgtgggctcgg

SEQ ID NO: 1656 - DNA, 49 bp, synthetic construct
  source 1..49: mol_type = other DNA
caagcagaagacggcatacgagatttctcagtcagtctcgtgggctcgg

SEQ ID NO: 1657 - DNA, 49 bp, synthetic construct
  source 1..49: mol_type = other DNA
caagcagaagacggcatacgagatataggagcttgtctcgtgggctcgg

SEQ ID NO: 1658 - DNA, 49 bp, synthetic construct
  source 1..49: mol_type = other DNA
caagcagaagacggcatacgagattagccgactcgtctcgtgggctcgg

SEQ ID NO: 1659 - DNA, 49 bp, synthetic construct
  source 1..49: mol_type = other DNA
caagcagaagacggcatacgagataagaactccggtctcgtgggctcgg

SEQ ID NO: 1660 - DNA, 49 bp, synthetic construct
  source 1..49: mol_type = other DNA
caagcagaagacggcatacgagatcttgagaccggtctcgtgggctcgg

SEQ ID NO: 1661 - DNA, 49 bp, synthetic construct
  source 1..49: mol_type = other DNA
caagcagaagacggcatacgagataacgccatacgtctcgtgggctcgg

SEQ ID NO: 1662 - DNA, 49 bp, synthetic construct
  source 1..49: mol_type = other DNA
caagcagaagacggcatacgagatcctactcaacgtctcgtgggctcgg

SEQ ID NO: 1663 - DNA, 49 bp, synthetic construct
  source 1..49: mol_type = other DNA
caagcagaagacggcatacgagattctagcctccgtctcgtgggctcgg

SEQ ID NO: 1664 - DNA, 49 bp, synthetic construct
  source 1..49: mol_type = other DNA
caagcagaagacggcatacgagatcgcttagatcgtctcgtgggctcgg

SEQ ID NO: 1665 - DNA, 49 bp, synthetic construct
  source 1..49: mol_type = other DNA
caagcagaagacggcatacgagatgcttaatcatgtctcgtgggctcgg

SEQ ID NO: 1666 - DNA, 49 bp, synthetic construct
  source 1..49: mol_type = other DNA
caagcagaagacggcatacgagatagcaggtcaagtctcgtgggctcgg

SEQ ID NO: 1667 - DNA, 49 bp, synthetic construct
  source 1..49: mol_type = other DNA
caagcagaagacggcatacgagatccgcttataagtctcgtgggctcgg

SEQ ID NO: 1668 - DNA, 49 bp, synthetic construct
  source 1..49: mol_type = other DNA
caagcagaagacggcatacgagatcctaatggaagtctcgtgggctcgg

SEQ ID NO: 1669 - DNA, 49 bp, synthetic construct
  source 1..49: mol_type = other DNA
caagcagaagacggcatacgagatcattggttccgtctcgtgggctcgg

SEQ ID NO: 1670 - DNA, 49 bp, synthetic construct
  source 1..49: mol_type = other DNA
caagcagaagacggcatacgagataccagttattgtctcgtgggctcgg

SEQ ID NO: 1671 - DNA, 49 bp, synthetic construct
  source 1..49: mol_type = other DNA
caagcagaagacggcatacgagatgactcgcttagtctcgtgggctcgg

SEQ ID NO: 1672 - DNA, 49 bp, synthetic construct
  source 1..49: mol_type = other DNA
caagcagaagacggcatacgagataattgctccggtctcgtgggctcgg

SEQ ID NO: 1673 - DNA, 49 bp, synthetic construct
  source 1..49: mol_type = other DNA
caagcagaagacggcatacgagattgcgaatgccgtctcgtgggctcgg

SEQ ID NO: 1674 - DNA, 49 bp, synthetic construct
  source 1..49: mol_type = other DNA
caagcagaagacggcatacgagattgcctccagcgtctcgtgggctcgg

SEQ ID NO: 1675 - DNA, 49 bp, synthetic construct
  source 1..49: mol_type = other DNA
caagcagaagacggcatacgagatttaggcttgagtctcgtgggctcgg

SEQ ID NO: 1676 - DNA, 49 bp, synthetic construct
  source 1..49: mol_type = other DNA
caagcagaagacggcatacgagatactctgagctgtctcgtgggctcgg

SEQ ID NO: 1677 - DNA, 49 bp, synthetic construct
  source 1..49: mol_type = other DNA
caagcagaagacggcatacgagatttcgaacgacgtctcgtgggctcgg

SEQ ID NO: 1678 - DNA, 49 bp, synthetic construct
  source 1..49: mol_type = other DNA
caagcagaagacggcatacgagattactgctcgggtctcgtgggctcgg

SEQ ID NO: 1679 - DNA, 49 bp, synthetic construct
  source 1..49: mol_type = other DNA
caagcagaagacggcatacgagattctagaagacgtctcgtgggctcgg

SEQ ID NO: 1680 - DNA, 49 bp, synthetic construct
  source 1..49: mol_type = other DNA
caagcagaagacggcatacgagattattggaatagtctcgtgggctcgg

SEQ ID NO: 1681 - DNA, 49 bp, synthetic construct
  source 1..49: mol_type = other DNA
caagcagaagacggcatacgagataagatatcaagtctcgtgggctcgg

SEQ ID NO: 1682 - DNA, 49 bp, synthetic construct
  source 1..49: mol_type = other DNA
caagcagaagacggcatacgagatagtccatggtgtctcgtgggctcgg

SEQ ID NO: 1683 - DNA, 49 bp, synthetic construct
  source 1..49: mol_type = other DNA
caagcagaagacggcatacgagatggttgaatacgtctcgtgggctcgg

SEQ ID NO: 1684 - DNA, 49 bp, synthetic construct
  source 1..49: mol_type = other DNA
caagcagaagacggcatacgagatctagcgatgggtctcgtgggctcgg

SEQ ID NO: 1685 - DNA, 49 bp, synthetic construct
  source 1..49: mol_type = other DNA
caagcagaagacggcatacgagatccaatacgccgtctcgtgggctcgg

SEQ ID NO: 1686 - DNA, 49 bp, synthetic construct
  source 1..49: mol_type = other DNA
caagcagaagacggcatacgagatgagatacctcgtctcgtgggctcgg

SEQ ID NO: 1687 - DNA, 49 bp, synthetic construct
  source 1..49: mol_type = other DNA
caagcagaagacggcatacgagatgctcaggagcgtctcgtgggctcgg

SEQ ID NO: 1688 - DNA, 49 bp, synthetic construct
  source 1..49: mol_type = other DNA
caagcagaagacggcatacgagatactagttgcagtctcgtgggctcgg

SEQ ID NO: 1689 - DNA, 49 bp, synthetic construct
  source 1..49: mol_type = other DNA
caagcagaagacggcatacgagatccgctatccagtctcgtgggctcgg

SEQ ID NO: 1690 - DNA, 49 bp, synthetic construct
  source 1..49: mol_type = other DNA
caagcagaagacggcatacgagatatgcaacttagtctcgtgggctcgg

SEQ ID NO: 1691 - DNA, 49 bp, synthetic construct
  source 1..49: mol_type = other DNA
caagcagaagacggcatacgagataggaccaagtgtctcgtgggctcgg

SEQ ID NO: 1692 - DNA, 49 bp, synthetic construct
  source 1..49: mol_type = other DNA
caagcagaagacggcatacgagatggcgtcctcagtctcgtgggctcgg

SEQ ID NO: 1693 - DNA, 49 bp, synthetic construct
  source 1..49: mol_type = other DNA
caagcagaagacggcatacgagatggaagctcgcgtctcgtgggctcgg

SEQ ID NO: 1694 - DNA, 49 bp, synthetic construct
  source 1..49: mol_type = other DNA
caagcagaagacggcatacgagataatcgttatagtctcgtgggctcgg

SEQ ID NO: 1695 - DNA, 49 bp, synthetic construct
  source 1..49: mol_type = other DNA
caagcagaagacggcatacgagatccgagagagggtctcgtgggctcgg

SEQ ID NO: 1696 - DNA, 49 bp, synthetic construct
  source 1..49: mol_type = other DNA
caagcagaagacggcatacgagatgaggaactcagtctcgtgggctcgg

SEQ ID NO: 1697 - DNA, 49 bp, synthetic construct
  source 1..49: mol_type = other DNA
caagcagaagacggcatacgagatggtctgagcagtctcgtgggctcgg

SEQ ID NO: 1698 - DNA, 49 bp, synthetic construct
  source 1..49: mol_type = other DNA
caagcagaagacggcatacgagataccattaagcgtctcgtgggctcgg

SEQ ID NO: 1699 - DNA, 49 bp, synthetic construct
  source 1..49: mol_type = other DNA
caagcagaagacggcatacgagataactctaccagtctcgtgggctcgg

SEQ ID NO: 1700 - DNA, 49 bp, synthetic construct
  source 1..49: mol_type = other DNA
caagcagaagacggcatacgagattgctcaactcgtctcgtgggctcgg

SEQ ID NO: 1701 - DNA, 49 bp, synthetic construct
  source 1..49: mol_type = other DNA
caagcagaagacggcatacgagatccggcagcctgtctcgtgggctcgg

SEQ ID NO: 1702 - DNA, 49 bp, synthetic construct
  source 1..49: mol_type = other DNA
caagcagaagacggcatacgagatctcgcgaccagtctcgtgggctcgg

SEQ ID NO: 1703 - DNA, 49 bp, synthetic construct
  source 1..49: mol_type = other DNA
caagcagaagacggcatacgagattggaccttaggtctcgtgggctcgg

SEQ ID NO: 1704 - DNA, 49 bp, synthetic construct
  source 1..49: mol_type = other DNA
caagcagaagacggcatacgagatggaatgaccggtctcgtgggctcgg

SEQ ID NO: 1705 - DNA, 49 bp, synthetic construct
  source 1..49: mol_type = other DNA
caagcagaagacggcatacgagatcagtatgatggtctcgtgggctcgg

SEQ ID NO: 1706 - DNA, 49 bp, synthetic construct
  source 1..49: mol_type = other DNA
caagcagaagacggcatacgagatctcatgaatagtctcgtgggctcgg

SEQ ID NO: 1707 - DNA, 49 bp, synthetic construct
  source 1..49: mol_type = other DNA
caagcagaagacggcatacgagatctgcgtagtagtctcgtgggctcgg

SEQ ID NO: 1708 - DNA, 49 bp, synthetic construct
  source 1..49: mol_type = other DNA
caagcagaagacggcatacgagatggagcaacctgtctcgtgggctcgg

SEQ ID NO: 1709 - DNA, 49 bp, synthetic construct
  source 1..49: mol_type = other DNA
caagcagaagacggcatacgagattcagtaatacgtctcgtgggctcgg

SEQ ID NO: 1710 - DNA, 49 bp, synthetic construct
  source 1..49: mol_type = other DNA
caagcagaagacggcatacgagatgacgctgcatgtctcgtgggctcgg

SEQ ID NO: 1711 - DNA, 49 bp, synthetic construct
  source 1..49: mol_type = other DNA
caagcagaagacggcatacgagatatctccagctgtctcgtgggctcgg

SEQ ID NO: 1712 - DNA, 49 bp, synthetic construct
  source 1..49: mol_type = other DNA
caagcagaagacggcatacgagatttagaactgcgtctcgtgggctcgg

SEQ ID NO: 1713 - DNA, 49 bp, synthetic construct
  source 1..49: mol_type = other DNA
caagcagaagacggcatacgagatccgtaacgccgtctcgtgggctcgg

SEQ ID NO: 1714 - DNA, 49 bp, synthetic construct
  source 1..49: mol_type = other DNA
caagcagaagacggcatacgagatgactatacctgtctcgtgggctcgg

SEQ ID NO: 1715 - DNA, 49 bp, synthetic construct
  source 1..49: mol_type = other DNA
caagcagaagacggcatacgagattgcgagaggtgtctcgtgggctcgg

SEQ ID NO: 1716 - DNA, 49 bp, synthetic construct
  source 1..49: mol_type = other DNA
caagcagaagacggcatacgagatataggcctcagtctcgtgggctcgg

SEQ ID NO: 1717 - DNA, 49 bp, synthetic construct
  source 1..49: mol_type = other DNA
caagcagaagacggcatacgagattcaattcaacgtctcgtgggctcgg

SEQ ID NO: 1718 - DNA, 49 bp, synthetic construct
  source 1..49: mol_type = other DNA
caagcagaagacggcatacgagatggctacctgggtctcgtgggctcgg

SEQ ID NO: 1719 - DNA, 49 bp, synthetic construct
  source 1..49: mol_type = other DNA
caagcagaagacggcatacgagatcttcttgaacgtctcgtgggctcgg

SEQ ID NO: 1720 - DNA, 49 bp, synthetic construct
  source 1..49: mol_type = other DNA
caagcagaagacggcatacgagatttacgcagcagtctcgtgggctcgg

SEQ ID NO: 1721 - DNA, 49 bp, synthetic construct
  source 1..49: mol_type = other DNA
caagcagaagacggcatacgagatataaccgccagtctcgtgggctcgg

SEQ ID NO: 1722 - DNA, 49 bp, synthetic construct
  source 1..49: mol_type = other DNA
caagcagaagacggcatacgagatccagtcgaatgtctcgtgggctcgg

SEQ ID NO: 1723 - DNA, 49 bp, synthetic construct
  source 1..49: mol_type = other DNA
caagcagaagacggcatacgagattaaccaactagtctcgtgggctcgg

SEQ ID NO: 1724 - DNA, 49 bp, synthetic construct
  source 1..49: mol_type = other DNA
caagcagaagacggcatacgagattagctggcgagtctcgtgggctcgg

SEQ ID NO: 1725 - DNA, 49 bp, synthetic construct
  source 1..49: mol_type = other DNA
caagcagaagacggcatacgagatcaatgacttggtctcgtgggctcgg

SEQ ID NO: 1726 - DNA, 49 bp, synthetic construct
  source 1..49: mol_type = other DNA
caagcagaagacggcatacgagatctctgcgatcgtctcgtgggctcgg

SEQ ID NO: 1727 - DNA, 49 bp, synthetic construct
  source 1..49: mol_type = other DNA
caagcagaagacggcatacgagatgcataccaatgtctcgtgggctcgg

SEQ ID NO: 1728 - DNA, 49 bp, synthetic construct
  source 1..49: mol_type = other DNA
caagcagaagacggcatacgagatacctgatagggtctcgtgggctcgg

SEQ ID NO: 1729 - DNA, 49 bp, synthetic construct
  source 1..49: mol_type = other DNA
caagcagaagacggcatacgagatatggttaccggtctcgtgggctcgg

SEQ ID NO: 1730 - DNA, 49 bp, synthetic construct
  source 1..49: mol_type = other DNA
caagcagaagacggcatacgagatcttaggttatgtctcgtgggctcgg

SEQ ID NO: 1731 - DNA, 49 bp, synthetic construct
  source 1..49: mol_type = other DNA
caagcagaagacggcatacgagatcgccttagccgtctcgtgggctcgg

SEQ ID NO: 1732 - DNA, 49 bp, synthetic construct
  source 1..49: mol_type = other DNA
caagcagaagacggcatacgagatacgtaacgtagtctcgtgggctcgg

SEQ ID NO: 1733 - DNA, 49 bp, synthetic construct
  source 1..49: mol_type = other DNA
caagcagaagacggcatacgagatttattctctagtctcgtgggctcgg

SEQ ID NO: 1734 - DNA, 49 bp, synthetic construct
  source 1..49: mol_type = other DNA
caagcagaagacggcatacgagatgcatagtatagtctcgtgggctcgg

SEQ ID NO: 1735 - DNA, 49 bp, synthetic construct
  source 1..49: mol_type = other DNA
caagcagaagacggcatacgagatcatgcgcatagtctcgtgggctcgg

SEQ ID NO: 1736 - DNA, 49 bp, synthetic construct
  source 1..49: mol_type = other DNA
caagcagaagacggcatacgagatgtaccaattcgtctcgtgggctcgg

SEQ ID NO: 1737 - DNA, 49 bp, synthetic construct
  source 1..49: mol_type = other DNA
caagcagaagacggcatacgagataacgagatcagtctcgtgggctcgg

SEQ ID NO: 1738 - DNA, 49 bp, synthetic construct
  source 1..49: mol_type = other DNA
caagcagaagacggcatacgagattctcgattaagtctcgtgggctcgg

SEQ ID NO: 1739 - DNA, 49 bp, synthetic construct
  source 1..49: mol_type = other DNA
caagcagaagacggcatacgagatcgtcgaccgggtctcgtgggctcgg

SEQ ID NO: 1740 - DNA, 49 bp, synthetic construct
  source 1..49: mol_type = other DNA
caagcagaagacggcatacgagatgttgatagctgtctcgtgggctcgg

SEQ ID NO: 1741 - DNA, 49 bp, synthetic construct
  source 1..49: mol_type = other DNA
caagcagaagacggcatacgagatcagcgttggtgtctcgtgggctcgg

SEQ ID NO: 1742 - DNA, 49 bp, synthetic construct
  source 1..49: mol_type = other DNA
caagcagaagacggcatacgagatatcggcattggtctcgtgggctcgg

SEQ ID NO: 1743 - DNA, 49 bp, synthetic construct
  source 1..49: mol_type = other DNA
caagcagaagacggcatacgagatggtagtcctagtctcgtgggctcgg

SEQ ID NO: 1744 - DNA, 49 bp, synthetic construct
  source 1..49: mol_type = other DNA
caagcagaagacggcatacgagattagcatcgcggtctcgtgggctcgg

SEQ ID NO: 1745 - DNA, 49 bp, synthetic construct
  source 1..49: mol_type = other DNA
caagcagaagacggcatacgagatactggtaaccgtctcgtgggctcgg

SEQ ID NO: 1746 - DNA, 49 bp, synthetic construct
  source 1..49: mol_type = other DNA
caagcagaagacggcatacgagattctactgaccgtctcgtgggctcgg

SEQ ID NO: 1747 - DNA, 49 bp, synthetic construct
  source 1..49: mol_type = other DNA
caagcagaagacggcatacgagatcaagagttatgtctcgtgggctcgg

SEQ ID NO: 1748 - DNA, 49 bp, synthetic construct
  source 1..49: mol_type = other DNA
caagcagaagacggcatacgagatcaattaggaagtctcgtgggctcgg

SEQ ID NO: 1749 - DNA, 49 bp, synthetic construct
  source 1..49: mol_type = other DNA
caagcagaagacggcatacgagatttgcggaaccgtctcgtgggctcgg

SEQ ID NO: 1750 - DNA, 49 bp, synthetic construct
  source 1..49: mol_type = other DNA
caagcagaagacggcatacgagatagccgaagtagtctcgtgggctcgg

SEQ ID NO: 1751 - DNA, 49 bp, synthetic construct
  source 1..49: mol_type = other DNA
caagcagaagacggcatacgagatggtccgtacggtctcgtgggctcgg

SEQ ID NO: 1752 - DNA, 49 bp, synthetic construct
  source 1..49: mol_type = other DNA
caagcagaagacggcatacgagatagcatgcaaggtctcgtgggctcgg

SEQ ID NO: 1753 - DNA, 49 bp, synthetic construct
  source 1..49: mol_type = other DNA
caagcagaagacggcatacgagattcttcgttgcgtctcgtgggctcgg

SEQ ID NO: 1754 - DNA, 49 bp, synthetic construct
  source 1..49: mol_type = other DNA
caagcagaagacggcatacgagatgttggaagaagtctcgtgggctcgg

SEQ ID NO: 1755 - DNA, 49 bp, synthetic construct
  source 1..49: mol_type = other DNA
caagcagaagacggcatacgagatggaatacggagtctcgtgggctcgg

SEQ ID NO: 1756 - DNA, 49 bp, synthetic construct
  source 1..49: mol_type = other DNA
caagcagaagacggcatacgagataccgacggtagtctcgtgggctcgg

SEQ ID NO: 1757 - DNA, 49 bp, synthetic construct
  source 1..49: mol_type = other DNA
caagcagaagacggcatacgagatatacttgattgtctcgtgggctcgg

SEQ ID NO: 1758 - DNA, 49 bp, synthetic construct
  source 1..49: mol_type = other DNA
caagcagaagacggcatacgagatgtcgttcgccgtctcgtgggctcgg

SEQ ID NO: 1759 - DNA, 49 bp, synthetic construct
  source 1..49: mol_type = other DNA
caagcagaagacggcatacgagataatgattgcagtctcgtgggctcgg

SEQ ID NO: 1760 - DNA, 49 bp, synthetic construct
  source 1..49: mol_type = other DNA
caagcagaagacggcatacgagatccattagcaggtctcgtgggctcgg

SEQ ID NO: 1761 - DNA, 49 bp, synthetic construct
  source 1..49: mol_type = other DNA
caagcagaagacggcatacgagatctgactaatggtctcgtgggctcgg

SEQ ID NO: 1762 - DNA, 49 bp, synthetic construct
  source 1..49: mol_type = other DNA
caagcagaagacggcatacgagatccttacggacgtctcgtgggctcgg

SEQ ID NO: 1763 - DNA, 49 bp, synthetic construct
  source 1..49: mol_type = other DNA
caagcagaagacggcatacgagatcgcataactagtctcgtgggctcgg

SEQ ID NO: 1764 - DNA, 49 bp, synthetic construct
  source 1..49: mol_type = other DNA
caagcagaagacggcatacgagataaccggaggagtctcgtgggctcgg

SEQ ID NO: 1765 - DNA, 49 bp, synthetic construct
  source 1..49: mol_type = other DNA
caagcagaagacggcatacgagataatgcagcgggtctcgtgggctcgg

SEQ ID NO: 1766 - DNA, 49 bp, synthetic construct
  source 1..49: mol_type = other DNA
caagcagaagacggcatacgagatcagtcggcaagtctcgtgggctcgg

SEQ ID NO: 1767 - DNA, 49 bp, synthetic construct
  source 1..49: mol_type = other DNA
caagcagaagacggcatacgagatatagaatccagtctcgtgggctcgg

SEQ ID NO: 1768 - DNA, 49 bp, synthetic construct
  source 1..49: mol_type = other DNA
caagcagaagacggcatacgagattctcagatatgtctcgtgggctcgg

SEQ ID NO: 1769 - DNA, 49 bp, synthetic construct
  source 1..49: mol_type = other DNA
caagcagaagacggcatacgagatacgaagtattgtctcgtgggctcgg

SEQ ID NO: 1770 - DNA, 49 bp, synthetic construct
  source 1..49: mol_type = other DNA
caagcagaagacggcatacgagatagacttatcagtctcgtgggctcgg

SEQ ID NO: 1771 - DNA, 49 bp, synthetic construct
  source 1..49: mol_type = other DNA
caagcagaagacggcatacgagattcgcgccgtagtctcgtgggctcgg

SEQ ID NO: 1772 - DNA, 49 bp, synthetic construct
  source 1..49: mol_type = other DNA
caagcagaagacggcatacgagatagcttgaagagtctcgtgggctcgg

SEQ ID NO: 1773 - DNA, 49 bp, synthetic construct
  source 1..49: mol_type = other DNA
caagcagaagacggcatacgagatcggtagctacgtctcgtgggctcgg

SEQ ID NO: 1774 - DNA, 49 bp, synthetic construct
  source 1..49: mol_type = other DNA
caagcagaagacggcatacgagatgcggcatgcggtctcgtgggctcgg

SEQ ID NO: 1775 - DNA, 49 bp, synthetic construct
  source 1..49: mol_type = other DNA
caagcagaagacggcatacgagataagactggctgtctcgtgggctcgg

SEQ ID NO: 1776 - DNA, 49 bp, synthetic construct
  source 1..49: mol_type = other DNA
caagcagaagacggcatacgagatcgcattcttagtctcgtgggctcgg

SEQ ID NO: 1777 - DNA, 49 bp, synthetic construct
  source 1..49: mol_type = other DNA
caagcagaagacggcatacgagattaccgtctccgtctcgtgggctcgg

SEQ ID NO: 1778 - DNA, 49 bp, synthetic construct
  source 1..49: mol_type = other DNA
caagcagaagacggcatacgagataatatagtatgtctcgtgggctcgg

SEQ ID NO: 1779 - DNA, 49 bp, synthetic construct
  source 1..49: mol_type = other DNA
caagcagaagacggcatacgagatatcataagatgtctcgtgggctcgg

SEQ ID NO: 1780 - DNA, 49 bp, synthetic construct
  source 1..49: mol_type = other DNA
caagcagaagacggcatacgagatatcaatatccgtctcgtgggctcgg

SEQ ID NO: 1781 - DNA, 49 bp, synthetic construct
  source 1..49: mol_type = other DNA
caagcagaagacggcatacgagattattaccaacgtctcgtgggctcgg

SEQ ID NO: 1782 - DNA, 49 bp, synthetic construct
  source 1..49: mol_type = other DNA
caagcagaagacggcatacgagatgagaagaccagtctcgtgggctcgg

SEQ ID NO: 1783 - DNA, 49 bp, synthetic construct
  source 1..49: mol_type = other DNA
caagcagaagacggcatacgagattggcgctctcgtctcgtgggctcgg

SEQ ID NO: 1784 - DNA, 49 bp, synthetic construct
  source 1..49: mol_type = other DNA
caagcagaagacggcatacgagatgcgacgataagtctcgtgggctcgg

SEQ ID NO: 1785 - DNA, 49 bp, synthetic construct
  source 1..49: mol_type = other DNA
caagcagaagacggcatacgagataacgtcgcgagtctcgtgggctcgg

SEQ ID NO: 1786 - DNA, 49 bp, synthetic construct
  source 1..49: mol_type = other DNA
caagcagaagacggcatacgagatatgaagcttcgtctcgtgggctcgg

SEQ ID NO: 1787 - DNA, 49 bp, synthetic construct
  source 1..49: mol_type = other DNA
caagcagaagacggcatacgagatgccatagagtgtctcgtgggctcgg

SEQ ID NO: 1788 - DNA, 49 bp, synthetic construct
  source 1..49: mol_type = other DNA
caagcagaagacggcatacgagattgactgagaagtctcgtgggctcgg

SEQ ID NO: 1789 - DNA, 49 bp, synthetic construct
  source 1..49: mol_type = other DNA
caagcagaagacggcatacgagatcggctccgaagtctcgtgggctcgg

SEQ ID NO: 1790 - DNA, 49 bp, synthetic construct
  source 1..49: mol_type = other DNA
caagcagaagacggcatacgagatcagccaattggtctcgtgggctcgg

SEQ ID NO: 1791 - DNA, 49 bp, synthetic construct
  source 1..49: mol_type = other DNA
caagcagaagacggcatacgagatgcgaccagttgtctcgtgggctcgg

SEQ ID NO: 1792 - DNA, 49 bp, synthetic construct
  source 1..49: mol_type = other DNA
caagcagaagacggcatacgagatcctaacgacggtctcgtgggctcgg

SEQ ID NO: 1793 - DNA, 49 bp, synthetic construct
  source 1..49: mol_type = other DNA
caagcagaagacggcatacgagatcttcgcaatcgtctcgtgggctcgg

SEQ ID NO: 1794 - DNA, 49 bp, synthetic construct
  source 1..49: mol_type = other DNA
caagcagaagacggcatacgagattgactccgttgtctcgtgggctcgg

SEQ ID NO: 1795 - DNA, 49 bp, synthetic construct
  source 1..49: mol_type = other DNA
caagcagaagacggcatacgagatgatagtcgctgtctcgtgggctcgg

SEQ ID NO: 1796 - DNA, 49 bp, synthetic construct
  source 1..49: mol_type = other DNA
caagcagaagacggcatacgagataaggtactaagtctcgtgggctcgg

SEQ ID NO: 1797 - DNA, 49 bp, synthetic construct
  source 1..49: mol_type = other DNA
caagcagaagacggcatacgagatttgcatgagggtctcgtgggctcgg

SEQ ID NO: 1798 - DNA, 49 bp, synthetic construct
  source 1..49: mol_type = other DNA
caagcagaagacggcatacgagatgtattatatagtctcgtgggctcgg

SEQ ID NO: 1799 - DNA, 49 bp, synthetic construct
  source 1..49: mol_type = other DNA
caagcagaagacggcatacgagatattcttggctgtctcgtgggctcgg

SEQ ID NO: 1800 - DNA, 49 bp, synthetic construct
  source 1..49: mol_type = other DNA
caagcagaagacggcatacgagattgcatcttgggtctcgtgggctcgg

SEQ ID NO: 1801 - DNA, 49 bp, synthetic construct
  source 1..49: mol_type = other DNA
caagcagaagacggcatacgagatgttggctcaagtctcgtgggctcgg

SEQ ID NO: 1802 - DNA, 49 bp, synthetic construct
  source 1..49: mol_type = other DNA
caagcagaagacggcatacgagataatatcattagtctcgtgggctcgg

SEQ ID NO: 1803 - DNA, 49 bp, synthetic construct
  source 1..49: mol_type = other DNA
caagcagaagacggcatacgagattaactaagtcgtctcgtgggctcgg

SEQ ID NO: 1804 - DNA, 49 bp, synthetic construct
  source 1..49: mol_type = other DNA
caagcagaagacggcatacgagatcaataaccaagtctcgtgggctcgg

SEQ ID NO: 1805 - DNA, 49 bp, synthetic construct
  source 1..49: mol_type = other DNA
caagcagaagacggcatacgagatttatactgcagtctcgtgggctcgg

SEQ ID NO: 1806 - DNA, 49 bp, synthetic construct
  source 1..49: mol_type = other DNA
caagcagaagacggcatacgagattgagcagagcgtctcgtgggctcgg

SEQ ID NO: 1807 - DNA, 49 bp, synthetic construct
  source 1..49: mol_type = other DNA
caagcagaagacggcatacgagattgcaagccaagtctcgtgggctcgg

SEQ ID NO: 1808 - DNA, 49 bp, synthetic construct
  source 1..49: mol_type = other DNA
caagcagaagacggcatacgagattggagaacgagtctcgtgggctcgg

SEQ ID NO: 1809 - DNA, 49 bp, synthetic construct
  source 1..49: mol_type = other DNA
caagcagaagacggcatacgagatatcggattcagtctcgtgggctcgg

SEQ ID NO: 1810 - DNA, 49 bp, synthetic construct
  source 1..49: mol_type = other DNA
caagcagaagacggcatacgagatactagaccgagtctcgtgggctcgg

SEQ ID NO: 1811 - DNA, 49 bp, synthetic construct
  source 1..49: mol_type = other DNA
caagcagaagacggcatacgagatcgagatgcttgtctcgtgggctcgg

SEQ ID NO: 1812 - DNA, 49 bp, synthetic construct
  source 1..49: mol_type = other DNA
caagcagaagacggcatacgagatttctattaatgtctcgtgggctcgg

SEQ ID NO: 1813 - DNA, 49 bp, synthetic construct
  source 1..49: mol_type = other DNA
caagcagaagacggcatacgagataattagtccagtctcgtgggctcgg

SEQ ID NO: 1814 - DNA, 49 bp, synthetic construct
  source 1..49: mol_type = other DNA
caagcagaagacggcatacgagatgctccaagccgtctcgtgggctcgg

SEQ ID NO: 1815 - DNA, 49 bp, synthetic construct
  source 1..49: mol_type = other DNA
caagcagaagacggcatacgagatctcttcctaagtctcgtgggctcgg

SEQ ID NO: 1816 - DNA, 49 bp, synthetic construct
  source 1..49: mol_type = other DNA
caagcagaagacggcatacgagatccgcgttaacgtctcgtgggctcgg

SEQ ID NO: 1817 - DNA, 49 bp, synthetic construct
  source 1..49: mol_type = other DNA
caagcagaagacggcatacgagatgacggaataggtctcgtgggctcgg

SEQ ID NO: 1818 - DNA, 49 bp, synthetic construct
  source 1..49: mol_type = other DNA
caagcagaagacggcatacgagatctcagagttggtctcgtgggctcgg

SEQ ID NO: 1819 - DNA, 49 bp, synthetic construct
  source 1..49: mol_type = other DNA
caagcagaagacggcatacgagatggacgtatgagtctcgtgggctcgg

SEQ ID NO: 1820 - DNA, 49 bp, synthetic construct
  source 1..49: mol_type = other DNA
caagcagaagacggcatacgagataagatgagtcgtctcgtgggctcgg

SEQ ID NO: 1821 - DNA, 49 bp, synthetic construct
  source 1..49: mol_type = other DNA
caagcagaagacggcatacgagatatgcgctaccgtctcgtgggctcgg

SEQ ID NO: 1822 - DNA, 49 bp, synthetic construct
  source 1..49: mol_type = other DNA
caagcagaagacggcatacgagatggacgcctaagtctcgtgggctcgg

SEQ ID NO: 1823 - DNA, 49 bp, synthetic construct
  source 1..49: mol_type = other DNA
caagcagaagacggcatacgagatcagttagaccgtctcgtgggctcgg

SEQ ID NO: 1824 - DNA, 49 bp, synthetic construct
  source 1..49: mol_type = other DNA
caagcagaagacggcatacgagatccgtctcaatgtctcgtgggctcgg

SEQ ID NO: 1825 - DNA, 49 bp, synthetic construct
  source 1..49: mol_type = other DNA
caagcagaagacggcatacgagatatggtacgttgtctcgtgggctcgg

SEQ ID NO: 1826 - DNA, 49 bp, synthetic construct
  source 1..49: mol_type = other DNA
caagcagaagacggcatacgagatgtaactgaacgtctcgtgggctcgg

SEQ ID NO: 1827 - DNA, 49 bp, synthetic construct
  source 1..49: mol_type = other DNA
caagcagaagacggcatacgagattaaggttaacgtctcgtgggctcgg

SEQ ID NO: 1828 - DNA, 49 bp, synthetic construct
  source 1..49: mol_type = other DNA
caagcagaagacggcatacgagatctactactccgtctcgtgggctcgg

SEQ ID NO: 1829 - DNA, 49 bp, synthetic construct
  source 1..49: mol_type = other DNA
caagcagaagacggcatacgagattctcaacctggtctcgtgggctcgg

SEQ ID NO: 1830 - DNA, 49 bp, synthetic construct
  source 1..49: mol_type = other DNA
caagcagaagacggcatacgagatgttattggttgtctcgtgggctcgg

SEQ ID NO: 1831 - DNA, 49 bp, synthetic construct
  source 1..49: mol_type = other DNA
caagcagaagacggcatacgagataataggtaccgtctcgtgggctcgg

SEQ ID NO: 1832 - DNA, 49 bp, synthetic construct
  source 1..49: mol_type = other DNA
caagcagaagacggcatacgagattgaggcagctgtctcgtgggctcgg

SEQ ID NO: 1833 - DNA, 49 bp, synthetic construct
  source 1..49: mol_type = other DNA
caagcagaagacggcatacgagattaccaaccaagtctcgtgggctcgg

SEQ ID NO: 1834 - DNA, 49 bp, synthetic construct
  source 1..49: mol_type = other DNA
caagcagaagacggcatacgagatccgatatcaggtctcgtgggctcgg

SEQ ID NO: 1835 - DNA, 49 bp, synthetic construct
  source 1..49: mol_type = other DNA
caagcagaagacggcatacgagatgttccatcaagtctcgtgggctcgg

SEQ ID NO: 1836 - DNA, 49 bp, synthetic construct
  source 1..49: mol_type = other DNA
caagcagaagacggcatacgagatcttctggtccgtctcgtgggctcgg

SEQ ID NO: 1837 - DNA, 49 bp, synthetic construct
  source 1..49: mol_type = other DNA
caagcagaagacggcatacgagatgacctcaggtgtctcgtgggctcgg

SEQ ID NO: 1838 - DNA, 49 bp, synthetic construct
  source 1..49: mol_type = other DNA
caagcagaagacggcatacgagatctcattgcaagtctcgtgggctcgg

SEQ ID NO: 1839 - DNA, 49 bp, synthetic construct
  source 1..49: mol_type = other DNA
caagcagaagacggcatacgagatgtcagttagtgtctcgtgggctcgg

SEQ ID NO: 1840 - DNA, 49 bp, synthetic construct
  source 1..49: mol_type = other DNA
caagcagaagacggcatacgagatacctcttaccgtctcgtgggctcgg

SEQ ID NO: 1841 - DNA, 49 bp, synthetic construct
  source 1..49: mol_type = other DNA
caagcagaagacggcatacgagatttgcgattacgtctcgtgggctcgg

SEQ ID NO: 1842 - DNA, 49 bp, synthetic construct
  source 1..49: mol_type = other DNA
caagcagaagacggcatacgagatttcatcatatgtctcgtgggctcgg

SEQ ID NO: 1843 - DNA, 49 bp, synthetic construct
  source 1..49: mol_type = other DNA
caagcagaagacggcatacgagatcttccgtagggtctcgtgggctcgg

SEQ ID NO: 1844 - DNA, 49 bp, synthetic construct
  source 1..49: mol_type = other DNA
caagcagaagacggcatacgagattcggagagtcgtctcgtgggctcgg

SEQ ID NO: 1845 - DNA, 49 bp, synthetic construct
  source 1..49: mol_type = other DNA
caagcagaagacggcatacgagatacgtatctatgtctcgtgggctcgg

SEQ ID NO: 1846 - DNA, 49 bp, synthetic construct
  source 1..49: mol_type = other DNA
caagcagaagacggcatacgagatttgcttcatagtctcgtgggctcgg

SEQ ID NO: 1847 - DNA, 49 bp, synthetic construct
  source 1..49: mol_type = other DNA
caagcagaagacggcatacgagattcgtctctacgtctcgtgggctcgg

SEQ ID NO: 1848 - DNA, 49 bp, synthetic construct
  source 1..49: mol_type = other DNA
caagcagaagacggcatacgagatgttatgcgaagtctcgtgggctcgg

SEQ ID NO: 1849 - DNA, 49 bp, synthetic construct
  source 1..49: mol_type = other DNA
caagcagaagacggcatacgagatggcgaatctagtctcgtgggctcgg

SEQ ID NO: 1850 - DNA, 49 bp, synthetic construct
  source 1..49: mol_type = other DNA
caagcagaagacggcatacgagatccgcgaagaagtctcgtgggctcgg

SEQ ID NO: 1851 - DNA, 49 bp, synthetic construct
  source 1..49: mol_type = other DNA
caagcagaagacggcatacgagatagaccaagaagtctcgtgggctcgg

SEQ ID NO: 1852 - DNA, 49 bp, synthetic construct
  source 1..49: mol_type = other DNA
caagcagaagacggcatacgagattaatctatacgtctcgtgggctcgg

SEQ ID NO: 1853 - DNA, 49 bp, synthetic construct
  source 1..49: mol_type = other DNA
caagcagaagacggcatacgagatagtcatagtcgtctcgtgggctcgg

SEQ ID NO: 1854 - DNA, 49 bp, synthetic construct
  source 1..49: mol_type = other DNA
caagcagaagacggcatacgagatttcgcggagcgtctcgtgggctcgg

SEQ ID NO: 1855 - DNA, 49 bp, synthetic construct
  source 1..49: mol_type = other DNA
caagcagaagacggcatacgagatgaatcgttccgtctcgtgggctcgg

SEQ ID NO: 1856 - DNA, 49 bp, synthetic construct
  source 1..49: mol_type = other DNA
caagcagaagacggcatacgagatacgaaggtacgtctcgtgggctcgg

SEQ ID NO: 1857 - DNA, 49 bp, synthetic construct
  source 1..49: mol_type = other DNA
caagcagaagacggcatacgagatagtcgcataagtctcgtgggctcgg

SEQ ID NO: 1858 - DNA, 49 bp, synthetic construct
  source 1..49: mol_type = other DNA
caagcagaagacggcatacgagataccaaccgttgtctcgtgggctcgg

SEQ ID NO: 1859 - DNA, 49 bp, synthetic construct
  source 1..49: mol_type = other DNA
caagcagaagacggcatacgagatttccttctaggtctcgtgggctcgg

SEQ ID NO: 1860 - DNA, 49 bp, synthetic construct
  source 1..49: mol_type = other DNA
caagcagaagacggcatacgagattcctccatacgtctcgtgggctcgg

SEQ ID NO: 1861 - DNA, 49 bp, synthetic construct
  source 1..49: mol_type = other DNA
caagcagaagacggcatacgagatgctacttacggtctcgtgggctcgg

SEQ ID NO: 1862 - DNA, 49 bp, synthetic construct
  source 1..49: mol_type = other DNA
caagcagaagacggcatacgagatttgacgactagtctcgtgggctcgg

SEQ ID NO: 1863 - DNA, 49 bp, synthetic construct
  source 1..49: mol_type = other DNA
caagcagaagacggcatacgagattccatactacgtctcgtgggctcgg

SEQ ID NO: 1864 - DNA, 49 bp, synthetic construct
  source 1..49: mol_type = other DNA
caagcagaagacggcatacgagattacgtccattgtctcgtgggctcgg

SEQ ID NO: 1865 - DNA, 49 bp, synthetic construct
  source 1..49: mol_type = other DNA
caagcagaagacggcatacgagatcagcgaacgggtctcgtgggctcgg

SEQ ID NO: 1866 - DNA, 49 bp, synthetic construct
  source 1..49: mol_type = other DNA
caagcagaagacggcatacgagatatattgactggtctcgtgggctcgg

SEQ ID NO: 1867 - DNA, 49 bp, synthetic construct
  source 1..49: mol_type = other DNA
caagcagaagacggcatacgagattcagtccgacgtctcgtgggctcgg

SEQ ID NO: 1868 - DNA, 49 bp, synthetic construct
  source 1..49: mol_type = other DNA
caagcagaagacggcatacgagatgcgcatggaagtctcgtgggctcgg

SEQ ID NO: 1869 - DNA, 49 bp, synthetic construct
  source 1..49: mol_type = other DNA
caagcagaagacggcatacgagatcatgccgtccgtctcgtgggctcgg

SEQ ID NO: 1870 - DNA, 49 bp, synthetic construct
  source 1..49: mol_type = other DNA
caagcagaagacggcatacgagatacgttgctccgtctcgtgggctcgg

SEQ ID NO: 1871 - DNA, 49 bp, synthetic construct
  source 1..49: mol_type = other DNA
caagcagaagacggcatacgagatagctaggacggtctcgtgggctcgg

SEQ ID NO: 1872 - DNA, 49 bp, synthetic construct
  source 1..49: mol_type = other DNA
caagcagaagacggcatacgagatctactaatatgtctcgtgggctcgg

SEQ ID NO: 1873 - DNA, 49 bp, synthetic construct
  source 1..49: mol_type = other DNA
caagcagaagacggcatacgagatagaaggaactgtctcgtgggctcgg

SEQ ID NO: 1874 - DNA, 49 bp, synthetic construct
  source 1..49: mol_type = other DNA
caagcagaagacggcatacgagatccttgaaggcgtctcgtgggctcgg

SEQ ID NO: 1875 - DNA, 49 bp, synthetic construct
  source 1..49: mol_type = other DNA
caagcagaagacggcatacgagattgaggcgttagtctcgtgggctcgg

SEQ ID NO: 1876 - DNA, 49 bp, synthetic construct
  source 1..49: mol_type = other DNA
caagcagaagacggcatacgagatagacgtattcgtctcgtgggctcgg

SEQ ID NO: 1877 - DNA, 49 bp, synthetic construct
  source 1..49: mol_type = other DNA
caagcagaagacggcatacgagataaggctcatcgtctcgtgggctcgg

SEQ ID NO: 1878 - DNA, 49 bp, synthetic construct
  source 1..49: mol_type = other DNA
caagcagaagacggcatacgagatagtctccgtagtctcgtgggctcgg

SEQ ID NO: 1879 - DNA, 49 bp, synthetic construct
  source 1..49: mol_type = other DNA
caagcagaagacggcatacgagataatgacctctgtctcgtgggctcgg

SEQ ID NO: 1880 - DNA, 49 bp, synthetic construct
  source 1..49: mol_type = other DNA
caagcagaagacggcatacgagattaactggccggtctcgtgggctcgg

SEQ ID NO: 1881 - DNA, 49 bp, synthetic construct
  source 1..49: mol_type = other DNA
caagcagaagacggcatacgagatttaagcgctagtctcgtgggctcgg

SEQ ID NO: 1882 - DNA, 49 bp, synthetic construct
  source 1..49: mol_type = other DNA
caagcagaagacggcatacgagatcataaggttggtctcgtgggctcgg

SEQ ID NO: 1883 - DNA, 49 bp, synthetic construct
  source 1..49: mol_type = other DNA
caagcagaagacggcatacgagatttcgtcgaaggtctcgtgggctcgg

SEQ ID NO: 1884 - DNA, 49 bp, synthetic construct
  source 1..49: mol_type = other DNA
caagcagaagacggcatacgagatctcggactctgtctcgtgggctcgg

SEQ ID NO: 1885 - DNA, 49 bp, synthetic construct
  source 1..49: mol_type = other DNA
caagcagaagacggcatacgagatcgaaccataggtctcgtgggctcgg

SEQ ID NO: 1886 - DNA, 49 bp, synthetic construct
  source 1..49: mol_type = other DNA
caagcagaagacggcatacgagatgccaatagttgtctcgtgggctcgg

SEQ ID NO: 1887 - DNA, 49 bp, synthetic construct
  source 1..49: mol_type = other DNA
caagcagaagacggcatacgagatacctcgcaaggtctcgtgggctcgg

SEQ ID NO: 1888 - DNA, 49 bp, synthetic construct
  source 1..49: mol_type = other DNA
caagcagaagacggcatacgagatacgagccgaagtctcgtgggctcgg

SEQ ID NO: 1889 - DNA, 49 bp, synthetic construct
  source 1..49: mol_type = other DNA
caagcagaagacggcatacgagatcagacttgaggtctcgtgggctcgg

SEQ ID NO: 1890 - DNA, 49 bp, synthetic construct
  source 1..49: mol_type = other DNA
caagcagaagacggcatacgagatcaggcctaatgtctcgtgggctcgg

SEQ ID NO: 1891 - DNA, 49 bp, synthetic construct
  source 1..49: mol_type = other DNA
caagcagaagacggcatacgagatacgttagccagtctcgtgggctcgg

SEQ ID NO: 1892 - DNA, 49 bp, synthetic construct
  source 1..49: mol_type = other DNA
caagcagaagacggcatacgagataatattagctgtctcgtgggctcgg

SEQ ID NO: 1893 - DNA, 49 bp, synthetic construct
  source 1..49: mol_type = other DNA
caagcagaagacggcatacgagatgaagattcctgtctcgtgggctcgg

SEQ ID NO: 1894 - DNA, 49 bp, synthetic construct
  source 1..49: mol_type = other DNA
caagcagaagacggcatacgagatgtctggtcttgtctcgtgggctcgg

SEQ ID NO: 1895 - DNA, 49 bp, synthetic construct
  source 1..49: mol_type = other DNA
caagcagaagacggcatacgagatcgcttatggtgtctcgtgggctcgg

SEQ ID NO: 1896 - DNA, 49 bp, synthetic construct
  source 1..49: mol_type = other DNA
caagcagaagacggcatacgagatgtaataagcagtctcgtgggctcgg

SEQ ID NO: 1897 - DNA, 49 bp, synthetic construct
  source 1..49: mol_type = other DNA
caagcagaagacggcatacgagataatgctctatgtctcgtgggctcgg

SEQ ID NO: 1898 - DNA, 49 bp, synthetic construct
  source 1..49: mol_type = other DNA
caagcagaagacggcatacgagatcaagataattgtctcgtgggctcgg

SEQ ID NO: 1899 - DNA, 49 bp, synthetic construct
  source 1..49: mol_type = other DNA
caagcagaagacggcatacgagatcgcgcggaacgtctcgtgggctcgg

SEQ ID NO: 1900 - DNA, 49 bp, synthetic construct
  source 1..49: mol_type = other DNA
caagcagaagacggcatacgagatcggacttcgggtctcgtgggctcgg

SEQ ID NO: 1901 - DNA, 49 bp, synthetic construct
  source 1..49: mol_type = other DNA
caagcagaagacggcatacgagatatcatggtaagtctcgtgggctcgg

SEQ ID NO: 1902 - DNA, 49 bp, synthetic construct
  source 1..49: mol_type = other DNA
caagcagaagacggcatacgagatgccatctatagtctcgtgggctcgg

SEQ ID NO: 1903 - DNA, 49 bp, synthetic construct
  source 1..49: mol_type = other DNA
caagcagaagacggcatacgagatccagatatgcgtctcgtgggctcgg

SEQ ID NO: 1904 - DNA, 49 bp, synthetic construct
  source 1..49: mol_type = other DNA
caagcagaagacggcatacgagatcttctagagtgtctcgtgggctcgg

SEQ ID NO: 1905 - DNA, 49 bp, synthetic construct
  source 1..49: mol_type = other DNA
caagcagaagacggcatacgagatcatattcttggtctcgtgggctcgg

SEQ ID NO: 1906 - DNA, 49 bp, synthetic construct
  source 1..49: mol_type = other DNA
caagcagaagacggcatacgagatcgcgcagcaggtctcgtgggctcgg

SEQ ID NO: 1907 - DNA, 49 bp, synthetic construct
  source 1..49: mol_type = other DNA
caagcagaagacggcatacgagatccgtaatatggtctcgtgggctcgg

SEQ ID NO: 1908 - DNA, 49 bp, synthetic construct
  source 1..49: mol_type = other DNA
caagcagaagacggcatacgagatcattccgccggtctcgtgggctcgg

SEQ ID NO: 1909 - DNA, 49 bp, synthetic construct
  source 1..49: mol_type = other DNA
caagcagaagacggcatacgagatttcagaagcagtctcgtgggctcgg

SEQ ID NO: 1910 - DNA, 49 bp, synthetic construct
  source 1..49: mol_type = other DNA
caagcagaagacggcatacgagatagaagaatacgtctcgtgggctcgg

SEQ ID NO: 1911 - DNA, 49 bp, synthetic construct
  source 1..49: mol_type = other DNA
caagcagaagacggcatacgagatattactactggtctcgtgggctcgg

SEQ ID NO: 1912 - DNA, 49 bp, synthetic construct
  source 1..49: mol_type = other DNA
caagcagaagacggcatacgagatgtctccgcgggtctcgtgggctcgg

SEQ ID NO: 1913 - DNA, 49 bp, synthetic construct
  source 1..49: mol_type = other DNA
caagcagaagacggcatacgagatgccgacgagcgtctcgtgggctcgg

SEQ ID NO: 1914 - DNA, 49 bp, synthetic construct
  source 1..49: mol_type = other DNA
caagcagaagacggcatacgagattgcctctaaggtctcgtgggctcgg

SEQ ID NO: 1915 - DNA, 49 bp, synthetic construct
  source 1..49: mol_type = other DNA
caagcagaagacggcatacgagatcgtcttggtcgtctcgtgggctcgg

SEQ ID NO: 1916 - DNA, 49 bp, synthetic construct
  source 1..49: mol_type = other DNA
caagcagaagacggcatacgagataccatctgctgtctcgtgggctcgg

SEQ ID NO: 1917 - DNA, 49 bp, synthetic construct
  source 1..49: mol_type = other DNA
caagcagaagacggcatacgagatatggttaattgtctcgtgggctcgg

SEQ ID NO: 1918 - DNA, 49 bp, synthetic construct
  source 1..49: mol_type = other DNA
caagcagaagacggcatacgagatagcgagtctggtctcgtgggctcgg

SEQ ID NO: 1919 - DNA, 49 bp, synthetic construct
  source 1..49: mol_type = other DNA
caagcagaagacggcatacgagataacggcgaaggtctcgtgggctcgg

SEQ ID NO: 1920 - DNA, 49 bp, synthetic construct
  source 1..49: mol_type = other DNA
caagcagaagacggcatacgagatggttggcagggtctcgtgggctcgg

SEQ ID NO: 1921 - DNA, 10 bp, synthetic construct
  source 1..10: mol_type = other DNA
tcggattcgg

SEQ ID NO: 1922 - DNA, 10 bp, synthetic construct
  source 1..10: mol_type = other DNA
tccggcttat

SEQ ID NO: 1923 - DNA, 10 bp, synthetic construct
  source 1..10: mol_type = other DNA
tcgccgccgg

SEQ ID NO: 1924 - DNA, 10 bp, synthetic construct
  source 1..10: mol_type = other DNA
ttggcaagcc

SEQ ID NO: 1925 - DNA, 10 bp, synthetic construct
  source 1..10: mol_type = other DNA
cagctagcgg

SEQ ID NO: 1926 - DNA, 10 bp, synthetic construct
  source 1..10: mol_type = other DNA
gtaggataag

SEQ ID NO: 1927 - DNA, 10 bp, synthetic construct
  source 1..10: mol_type = other DNA
aagtagctca

SEQ ID NO: 1928 - DNA, 10 bp, synthetic construct
  source 1..10: mol_type = other DNA
taagtcctga

SEQ ID NO: 1929 - DNA, 10 bp, synthetic construct
  source 1..10: mol_type = other DNA
gcggctgcgg

SEQ ID NO: 1930 - DNA, 10 bp, synthetic construct
  source 1..10: mol_type = other DNA
accaggcgca

SEQ ID NO: 1931 - DNA, 10 bp, synthetic construct
  source 1..10: mol_type = other DNA
ccgtatgatt

SEQ ID NO: 1932 - DNA, 10 bp, synthetic construct
  source 1..10: mol_type = other DNA
ttgattggcg

SEQ ID NO: 1933 - DNA, 10 bp, synthetic construct
  source 1..10: mol_type = other DNA
ctaagccttg

SEQ ID NO: 1934 - DNA, 10 bp, synthetic construct
  source 1..10: mol_type = other DNA
cgtcgagcgc

SEQ ID NO: 1935 - DNA, 10 bp, synthetic construct
  source 1..10: mol_type = other DNA
tattgctgga

SEQ ID NO: 1936 - DNA, 10 bp, synthetic construct
  source 1..10: mol_type = other DNA
agttctcatg

SEQ ID NO: 1937 - DNA, 10 bp, synthetic construct
  source 1..10: mol_type = other DNA
agattacgtt

SEQ ID NO: 1938 - DNA, 10 bp, synthetic construct
  source 1..10: mol_type = other DNA
agaggagaat

SEQ ID NO: 1939 - DNA, 10 bp, synthetic construct
  source 1..10: mol_type = other DNA
aacgcgcaga

SEQ ID NO: 1940 - DNA, 10 bp, synthetic construct
  source 1..10: mol_type = other DNA
gcatatgagc

SEQ ID NO: 1941 - DNA, 10 bp, synthetic construct
  source 1..10: mol_type = other DNA
cgttaccgct

SEQ ID NO: 1942 - DNA, 10 bp, synthetic construct
  source 1..10: mol_type = other DNA
actattcatt

SEQ ID NO: 1943 - DNA, 10 bp, synthetic construct
  source 1..10: mol_type = other DNA
ccagatacgg

SEQ ID NO: 1944 - DNA, 10 bp, synthetic construct
  source 1..10: mol_type = other DNA
cagactaagg

SEQ ID NO: 1945 - DNA, 10 bp, synthetic construct
  source 1..10: mol_type = other DNA
ctaactaggt

SEQ ID NO: 1946 - DNA, 10 bp, synthetic construct
  source 1..10: mol_type = other DNA
gtactcctat

SEQ ID NO: 1947 - DNA, 10 bp, synthetic construct
  source 1..10: mol_type = other DNA
ctcgtcgtag

SEQ ID NO: 1948 - DNA, 10 bp, synthetic construct
  source 1..10: mol_type = other DNA
gaactcgact

SEQ ID NO: 1949 - DNA, 10 bp, synthetic construct
  source 1..10: mol_type = other DNA
gactggacca

SEQ ID NO: 1950 - DNA, 10 bp, synthetic construct
  source 1..10: mol_type = other DNA
ttgcttagat

SEQ ID NO: 1951 - DNA, 10 bp, synthetic construct
  source 1..10: mol_type = other DNA
aacgaattcg

SEQ ID NO: 1952 - DNA, 10 bp, synthetic construct
  source 1..10: mol_type = other DNA
tctatcgctg

SEQ ID NO: 1953 - DNA, 10 bp, synthetic construct
  source 1..10: mol_type = other DNA
catagcgacc

SEQ ID NO: 1954 - DNA, 10 bp, synthetic construct
  source 1..10: mol_type = other DNA
gctaacggat

SEQ ID NO: 1955 - DNA, 10 bp, synthetic construct
  source 1..10: mol_type = other DNA
ctaattgcga

SEQ ID NO: 1956 - DNA, 10 bp, synthetic construct
  source 1..10: mol_type = other DNA
ctagccagcc

SEQ ID NO: 1957 - DNA, 10 bp, synthetic construct
  source 1..10: mol_type = other DNA
gcaagaccgt

SEQ ID NO: 1958 - DNA, 10 bp, synthetic construct
  source 1..10: mol_type = other DNA
cgaatggagc

SEQ ID NO: 1959 - DNA, 10 bp, synthetic construct
  source 1..10: mol_type = other DNA
cgcttatcgt

SEQ ID NO: 1960 - DNA, 10 bp, synthetic construct
  source 1..10: mol_type = other DNA
gcgctatggt

SEQ ID NO: 1961 - DNA, 10 bp, synthetic construct
  source 1..10: mol_type = other DNA
ccgctaagag

SEQ ID NO: 1962 - DNA, 10 bp, synthetic construct
  source 1..10: mol_type = other DNA
agttgaatca

SEQ ID NO: 1963 - DNA, 10 bp, synthetic construct
  source 1..10: mol_type = other DNA
cgcggccata

SEQ ID NO: 1964 - DNA, 10 bp, synthetic construct
  source 1..10: mol_type = other DNA
tgcgacctct

SEQ ID NO: 1965 - DNA, 10 bp, synthetic construct
  source 1..10: mol_type = other DNA
tcaatctcct

SEQ ID NO: 1966 - DNA, 10 bp, synthetic construct
  source 1..10: mol_type = other DNA
ctatatagcc

SEQ ID NO: 1967 - DNA, 10 bp, synthetic construct
  source 1..10: mol_type = other DNA
aagtacgcga

SEQ ID NO: 1968 - DNA, 10 bp, synthetic construct
  source 1..10: mol_type = other DNA
cattattatt

SEQ ID NO: 1969 - DNA, 10 bp, synthetic construct
  source 1..10: mol_type = other DNA
atggaacgaa

SEQ ID NO: 1970 - DNA, 10 bp, synthetic construct
  source 1..10: mol_type = other DNA
tgattaggta

SEQ ID NO: 1971 - DNA, 10 bp, synthetic construct
  source 1..10: mol_type = other DNA
aatattactt

SEQ ID NO: 1972 - DNA, 10 bp, synthetic construct
  source 1..10: mol_type = other DNA
attcttagct

SEQ ID NO: 1973 - DNA, 10 bp, synthetic construct
  source 1..10: mol_type = other DNA
atacctcgac

SEQ ID NO: 1974 - DNA, 10 bp, synthetic construct
  source 1..10: mol_type = other DNA
ctactaataa

SEQ ID NO: 1975 - DNA, 10 bp, synthetic construct
  source 1..10: mol_type = other DNA
gatcttcgca

SEQ ID NO: 1976 - DNA, 10 bp, synthetic construct
  source 1..10: mol_type = other DNA
agccgtagtt

SEQ ID NO: 1977 - DNA, 10 bp, synthetic construct
  source 1..10: mol_type = other DNA
gcgttccgtt

SEQ ID NO: 1978 - DNA, 10 bp, synthetic construct
  source 1..10: mol_type = other DNA
tcgtagcatc

SEQ ID NO: 1979 - DNA, 10 bp, synthetic construct
  source 1..10: mol_type = other DNA
attggcagat

SEQ ID NO: 1980 - DNA, 10 bp, synthetic construct
  source 1..10: mol_type = other DNA
ttgatacgat

SEQ ID NO: 1981 - DNA, 10 bp, synthetic construct
  source 1..10: mol_type = other DNA
tagaggcgtt

SEQ ID NO: 1982 - DNA, 10 bp, synthetic construct
  source 1..10: mol_type = other DNA
tggttgccgt

SEQ ID NO: 1983 - DNA, 10 bp, synthetic construct
  source 1..10: mol_type = other DNA
tcttagcctg

SEQ ID NO: 1984 - DNA, 10 bp, synthetic construct
  source 1..10: mol_type = other DNA
tgatattgcg

SEQ ID NO: 1985 - DNA, 10 bp, synthetic construct
  source 1..10: mol_type = other DNA
ggttatcgaa

SEQ ID NO: 1986 - DNA, 10 bp, synthetic construct
  source 1..10: mol_type = other DNA
tcttgaggtt

SEQ ID NO: 1987 - DNA, 10 bp, synthetic construct
  source 1..10: mol_type = other DNA
atggcgcctg

SEQ ID NO: 1988 - DNA, 10 bp, synthetic construct
  source 1..10: mol_type = other DNA
tataatagtt

SEQ ID NO: 1989 - DNA, 10 bp, synthetic construct
  source 1..10: mol_type = other DNA
taggtaactt

SEQ ID NO: 1990 - DNA, 10 bp, synthetic construct
  source 1..10: mol_type = other DNA
tcctctgccg

SEQ ID NO: 1991 - DNA, 10 bp, synthetic construct
  source 1..10: mol_type = other DNA
ttattgaggc

SEQ ID NO: 1992 - DNA, 10 bp, synthetic construct
  source 1..10: mol_type = other DNA
acggcgttaa

SEQ ID NO: 1993 - DNA, 10 bp, synthetic construct
  source 1..10: mol_type = other DNA
gcatcgtatg

SEQ ID NO: 1994 - DNA, 10 bp, synthetic construct
  source 1..10: mol_type = other DNA
aggtcagctt

SEQ ID NO: 1995 - DNA, 10 bp, synthetic construct
  source 1..10: mol_type = other DNA
ataaggactc

SEQ ID NO: 1996 - DNA, 10 bp, synthetic construct
  source 1..10: mol_type = other DNA
ttgccgtagg

SEQ ID NO: 1997 - DNA, 10 bp, synthetic construct
  source 1..10: mol_type = other DNA
ttcgaatatt

SEQ ID NO: 1998 - DNA, 10 bp, synthetic construct
  source 1..10: mol_type = other DNA
gattcttgaa

SEQ ID NO: 1999 - DNA, 10 bp, synthetic construct
  source 1..10: mol_type = other DNA
ttgcgagcat

SEQ ID NO: 2000 - DNA, 10 bp, synthetic construct
  source 1..10: mol_type = other DNA
ggcttactcc

SEQ ID NO: 2001 - DNA, 10 bp, synthetic construct
  source 1..10: mol_type = other DNA
aatacgataa

SEQ ID NO: 2002 - DNA, 10 bp, synthetic construct
  source 1..10: mol_type = other DNA
tattagactt

SEQ ID NO: 2003 - DNA, 10 bp, synthetic construct
  source 1..10: mol_type = other DNA
tagtaagccg

SEQ ID NO: 2004 - DNA, 10 bp, synthetic construct
  source 1..10: mol_type = other DNA
agaccatatc

SEQ ID NO: 2005 - DNA, 10 bp, synthetic construct
  source 1..10: mol_type = other DNA
tggacgacta

SEQ ID NO: 2006 - DNA, 10 bp, synthetic construct
  source 1..10: mol_type = other DNA
gtagcagcta

SEQ ID NO: 2007 - DNA, 10 bp, synthetic construct
  source 1..10: mol_type = other DNA
gcttgaagag

SEQ ID NO: 2008 - DNA, 10 bp, synthetic construct
  source 1..10: mol_type = other DNA
gcgcgttcat

SEQ ID NO: 2009 - DNA, 10 bp, synthetic construct
  source 1..10: mol_type = other DNA
ttccgtcgac

SEQ ID NO: 2010 - DNA, 10 bp, synthetic construct
  source 1..10: mol_type = other DNA
ctcaattagt

SEQ ID NO: 2011 - DNA, 10 bp, synthetic construct
  source 1..10: mol_type = other DNA
attatgcaag

SEQ ID NO: 2012 - DNA, 10 bp, synthetic construct
  source 1..10: mol_type = other DNA
ttggtaagga

SEQ ID NO: 2013 - DNA, 10 bp, synthetic construct
  source 1..10: mol_type = other DNA
gtaggctgca

SEQ ID NO: 2014 - DNA, 10 bp, synthetic construct
  source 1..10: mol_type = other DNA
cctcagctcc

SEQ ID NO: 2015 - DNA, 10 bp, synthetic construct
  source 1..10: mol_type = other DNA
agtccgctgc

SEQ ID NO: 2016 - DNA, 10 bp, synthetic construct
  source 1..10: mol_type = other DNA
gagcgcgatg

SEQ ID NO: 2017 - DNA, 10 bp, synthetic construct
  source 1..10: mol_type = other DNA
taggccagaa

SEQ ID NO: 2018 - DNA, 10 bp, synthetic construct
  source 1..10: mol_type = other DNA
atcgccaatt

SEQ ID NO: 2019 - DNA, 10 bp, synthetic construct
  source 1..10: mol_type = other DNA
gcggttgcct

SEQ ID NO: 2020 - DNA, 10 bp, synthetic construct
  source 1..10: mol_type = other DNA
atcattgcgt

SEQ ID NO: 2021 - DNA, 10 bp, synthetic construct
  source 1..10: mol_type = other DNA
agtaacgagt

SEQ ID NO: 2022 - DNA, 10 bp, synthetic construct
  source 1..10: mol_type = other DNA
tgctgacttg

SEQ ID NO: 2023 - DNA, 10 bp, synthetic construct
  source 1..10: mol_type = other DNA
tatccgtacc

SEQ ID NO: 2024 - DNA, 10 bp, synthetic construct
  source 1..10: mol_type = other DNA
gaccattgag

SEQ ID NO: 2025 - DNA, 10 bp, synthetic construct
  source 1..10: mol_type = other DNA
tcttcggagt

SEQ ID NO: 2026 - DNA, 10 bp, synthetic construct
  source 1..10: mol_type = other DNA
gccttggatt

SEQ ID NO: 2027 - DNA, 10 bp, synthetic construct
  source 1..10: mol_type = other DNA
gcgatggacg

SEQ ID NO: 2028 - DNA, 10 bp, synthetic construct
  source 1..10: mol_type = other DNA
tcgtacctaa

SEQ ID NO: 2029 - DNA, 10 bp, synthetic construct
  source 1..10: mol_type = other DNA
agatggtaag

SEQ ID NO: 2030 - DNA, 10 bp, synthetic construct
  source 1..10: mol_type = other DNA
tcttatctcg

SEQ ID NO: 2031 - DNA, 10 bp, synthetic construct
  source 1..10: mol_type = other DNA
tagaagatcg

SEQ ID NO: 2032 - DNA, 10 bp, synthetic construct
  source 1..10: mol_type = other DNA
ggatcggaac

SEQ ID NO: 2033 - DNA, 10 bp, synthetic construct
  source 1..10: mol_type = other DNA
ttcttatggc

SEQ ID NO: 2034 - DNA, 10 bp, synthetic construct
  source 1..10: mol_type = other DNA
ttatgaatct

SEQ ID NO: 2035 - DNA, 10 bp, synthetic construct
  source 1..10: mol_type = other DNA
tgacgctctg

SEQ ID NO: 2036 - DNA, 10 bp, synthetic construct
  source 1..10: mol_type = other DNA
ctggctcctc

SEQ ID NO: 2037 - DNA, 10 bp, synthetic construct
  source 1..10: mol_type = other DNA
ggatcctcat

SEQ ID NO: 2038 - DNA, 10 bp, synthetic construct
  source 1..10: mol_type = other DNA
ttgagcgccg

SEQ ID NO: 2039 - DNA, 10 bp, synthetic construct
  source 1..10: mol_type = other DNA
tgacgtaagg

SEQ ID NO: 2040 - DNA, 10 bp, synthetic construct
  source 1..10: mol_type = other DNA
tgactgagaa

SEQ ID NO: 2041 - DNA, 10 bp, synthetic construct
  source 1..10: mol_type = other DNA
aagctcctat

SEQ ID NO: 2042 - DNA, 10 bp, synthetic construct
  source 1..10: mol_type = other DNA
gagtcggcta

SEQ ID NO: 2043 - DNA, 10 bp, synthetic construct
  source 1..10: mol_type = other DNA
cggagttctt

SEQ ID NO: 2044 - DNA, 10 bp, synthetic construct
  source 1..10: mol_type = other DNA
cggtctcaag

SEQ ID NO: 2045 - DNA, 10 bp, synthetic construct
  source 1..10: mol_type = other DNA
gtatggcgtt

SEQ ID NO: 2046 - DNA, 10 bp, synthetic construct
  source 1..10: mol_type = other DNA
gttgagtagg

SEQ ID NO: 2047 - DNA, 10 bp, synthetic construct
  source 1..10: mol_type = other DNA
ggaggctaga

SEQ ID NO: 2048 - DNA, 10 bp, synthetic construct
  source 1..10: mol_type = other DNA
gatctaagcg

SEQ ID NO: 2049 - DNA, 10 bp, synthetic construct
  source 1..10: mol_type = other DNA
atgattaagc

SEQ ID NO: 2050 - DNA, 10 bp, synthetic construct
  source 1..10: mol_type = other DNA
ttgacctgct

SEQ ID NO: 2051 - DNA, 10 bp, synthetic construct
  source 1..10: mol_type = other DNA
ttataagcgg

SEQ ID NO: 2052 - DNA, 10 bp, synthetic construct
  source 1..10: mol_type = other DNA
ttccattagg

SEQ ID NO: 2053 - DNA, 10 bp, synthetic construct
  source 1..10: mol_type = other DNA
ggaaccaatg

SEQ ID NO: 2054 - DNA, 10 bp, synthetic construct
  source 1..10: mol_type = other DNA
aataactggt

SEQ ID NO: 2055 - DNA, 10 bp, synthetic construct
  source 1..10: mol_type = other DNA
taagcgagtc

SEQ ID NO: 2056 - DNA, 10 bp, synthetic construct
  source 1..10: mol_type = other DNA
cggagcaatt

SEQ ID NO: 2057 - DNA, 10 bp, synthetic construct
  source 1..10: mol_type = other DNA
ggcattcgca

SEQ ID NO: 2058 - DNA, 10 bp, synthetic construct
  source 1..10: mol_type = other DNA
gctggaggca

SEQ ID NO: 2059 - DNA, 10 bp, synthetic construct
  source 1..10: mol_type = other DNA
tcaagcctaa

SEQ ID NO: 2060 - DNA, 10 bp, synthetic construct
  source 1..10: mol_type = other DNA
agctcagagt

SEQ ID NO: 2061 - DNA, 10 bp, synthetic construct
  source 1..10: mol_type = other DNA
gtcgttcgaa

SEQ ID NO: 2062 - DNA, 10 bp, synthetic construct
  source 1..10: mol_type = other DNA
ccgagcagta

SEQ ID NO: 2063 - DNA, 10 bp, synthetic construct
  source 1..10: mol_type = other DNA
gtcttctaga

SEQ ID NO: 2064 - DNA, 10 bp, synthetic construct
  source 1..10: mol_type = other DNA
tattccaata

SEQ ID NO: 2065 - DNA, 10 bp, synthetic construct
  source 1..10: mol_type = other DNA
ttgatatctt

SEQ ID NO: 2066 - DNA, 10 bp, synthetic construct
  source 1..10: mol_type = other DNA
accatggact

SEQ ID NO: 2067 - DNA, 10 bp, synthetic construct
  source 1..10: mol_type = other DNA
gtattcaacc

SEQ ID NO: 2068 - DNA, 10 bp, synthetic construct
  source 1..10: mol_type = other DNA
ccatcgctag

SEQ ID NO: 2069 - DNA, 10 bp, synthetic construct
  source 1..10: mol_type = other DNA
ggcgtattgg

SEQ ID NO: 2070 - DNA, 10 bp, synthetic construct
  source 1..10: mol_type = other DNA
gaggtatctc

SEQ ID NO: 2071 - DNA, 10 bp, synthetic construct
  source 1..10: mol_type = other DNA
gctcctgagc

SEQ ID NO: 2072 - DNA, 10 bp, synthetic construct
  source 1..10: mol_type = other DNA
tgcaactagt

SEQ ID NO: 2073 - DNA, 10 bp, synthetic construct
  source 1..10: mol_type = other DNA
tggatagcgg

SEQ ID NO: 2074 - DNA, 10 bp, synthetic construct
  source 1..10: mol_type = other DNA
taagttgcat

SEQ ID NO: 2075 - DNA, 10 bp, synthetic construct
  source 1..10: mol_type = other DNA
acttggtcct

SEQ ID NO: 2076 - DNA, 10 bp, synthetic construct
  source 1..10: mol_type = other DNA
tgaggacgcc

SEQ ID NO: 2077 - DNA, 10 bp, synthetic construct
  source 1..10: mol_type = other DNA
gcgagcttcc

SEQ ID NO: 2078 - DNA, 10 bp, synthetic construct
  source 1..10: mol_type = other DNA
tataacgatt

SEQ ID NO: 2079 - DNA, 10 bp, synthetic construct
  source 1..10: mol_type = other DNA
cctctctcgg

SEQ ID NO: 2080 - DNA, 10 bp, synthetic construct
  source 1..10: mol_type = other DNA
tgagttcctc

SEQ ID NO: 2081 - DNA, 10 bp, synthetic construct
  source 1..10: mol_type = other DNA
tgctcagacc

SEQ ID NO: 2082 - DNA, 10 bp, synthetic construct
  source 1..10: mol_type = other DNA
gcttaatggt

SEQ ID NO: 2083 - DNA, 10 bp, synthetic construct
  source 1..10: mol_type = other DNA
tggtagagtt

SEQ ID NO: 2084 - DNA, 10 bp, synthetic construct
  source 1..10: mol_type = other DNA
gagttgagca

SEQ ID NO: 2085 - DNA, 10 bp, synthetic construct
  source 1..10: mol_type = other DNA
aggctgccgg

SEQ ID NO: 2086 - DNA, 10 bp, synthetic construct
  source 1..10: mol_type = other DNA
tggtcgcgag

SEQ ID NO: 2087 - DNA, 10 bp, synthetic construct
  source 1..10: mol_type = other DNA
ctaaggtcca

SEQ ID NO: 2088 - DNA, 10 bp, synthetic construct
  source 1..10: mol_type = other DNA
cggtcattcc

SEQ ID NO: 2089 - DNA, 10 bp, synthetic construct
  source 1..10: mol_type = other DNA
catcatactg

SEQ ID NO: 2090 - DNA, 10 bp, synthetic construct
  source 1..10: mol_type = other DNA
tattcatgag

SEQ ID NO: 2091 - DNA, 10 bp, synthetic construct
  source 1..10: mol_type = other DNA
tactacgcag

SEQ ID NO: 2092 - DNA, 10 bp, synthetic construct
  source 1..10: mol_type = other DNA
aggttgctcc

SEQ ID NO: 2093 - DNA, 10 bp, synthetic construct
  source 1..10: mol_type = other DNA
gtattactga

SEQ ID NO: 2094 - DNA, 10 bp, synthetic construct
  source 1..10: mol_type = other DNA
atgcagcgtc

SEQ ID NO: 2095 - DNA, 10 bp, synthetic construct
  source 1..10: mol_type = other DNA
agctggagat

SEQ ID NO: 2096 - DNA, 10 bp, synthetic construct
  source 1..10: mol_type = other DNA
gcagttctaa

SEQ ID NO: 2097 - DNA, 10 bp, synthetic construct
  source 1..10: mol_type = other DNA
ggcgttacgg

SEQ ID NO: 2098 - DNA, 10 bp, synthetic construct
  source 1..10: mol_type = other DNA
aggtatagtc

SEQ ID NO: 2099 - DNA, 10 bp, synthetic construct
  source 1..10: mol_type = other DNA
acctctcgca

SEQ ID NO: 2100 - DNA, 10 bp, synthetic construct
  source 1..10: mol_type = other DNA
tgaggcctat

SEQ ID NO: 2101 - DNA, 10 bp, synthetic construct
  source 1..10: mol_type = other DNA
gttgaattga

SEQ ID NO: 2102 - DNA, 10 bp, synthetic construct
  source 1..10: mol_type = other DNA
ccaggtagcc

SEQ ID NO: 2103 - DNA, 10 bp, synthetic construct
  source 1..10: mol_type = other DNA
gttcaagaag

SEQ ID NO: 2104 - DNA, 10 bp, synthetic construct
  source 1..10: mol_type = other DNA
tgctgcgtaa

SEQ ID NO: 2105 - DNA, 10 bp, synthetic construct
  source 1..10: mol_type = other DNA
tggcggttat

SEQ ID NO: 2106 - DNA, 10 bp, synthetic construct
  source 1..10: mol_type = other DNA
attcgactgg

SEQ ID NO: 2107 - DNA, 10 bp, synthetic construct
  source 1..10: mol_type = other DNA
tagttggtta

SEQ ID NO: 2108 - DNA, 10 bp, synthetic construct
  source 1..10: mol_type = other DNA
tcgccagcta

SEQ ID NO: 2109 - DNA, 10 bp, synthetic construct
  source 1..10: mol_type = other DNA
caagtcattg

SEQ ID NO: 2110 - DNA, 10 bp, synthetic construct
  source 1..10: mol_type = other DNA
gatcgcagag

SEQ ID NO: 2111 - DNA, 10 bp, synthetic construct
  source 1..10: mol_type = other DNA
attggtatgc

SEQ ID NO: 2112 - DNA, 10 bp, synthetic construct
  source 1..10: mol_type = other DNA
cctatcaggt

SEQ ID NO: 2113 - DNA, 10 bp, synthetic construct
  source 1..10: mol_type = other DNA
cggtaaccat

SEQ ID NO: 2114 - DNA, 10 bp, synthetic construct
  source 1..10: mol_type = other DNA
ataacctaag

SEQ ID NO: 2115 - DNA, 10 bp, synthetic construct
  source 1..10: mol_type = other DNA
ggctaaggcg

SEQ ID NO: 2116 - DNA, 10 bp, synthetic construct
  source 1..10: mol_type = other DNA
tacgttacgt

SEQ ID NO: 2117 - DNA, 10 bp, synthetic construct
  source 1..10: mol_type = other DNA
tagagaataa

SEQ ID NO: 2118 - DNA, 10 bp, synthetic construct
  source 1..10: mol_type = other DNA
tatactatgc

SEQ ID NO: 2119 - DNA, 10 bp, synthetic construct
  source 1..10: mol_type = other DNA
tatgcgcatg

SEQ ID NO: 2120 - DNA, 10 bp, synthetic construct
  source 1..10: mol_type = other DNA
gaattggtac

SEQ ID NO: 2121 - DNA, 10 bp, synthetic construct
  source 1..10: mol_type = other DNA
tgatctcgtt

SEQ ID NO: 2122 - DNA, 10 bp, synthetic construct
  source 1..10: mol_type = other DNA
ttaatcgaga

SEQ ID NO: 2123 - DNA, 10 bp, synthetic construct
  source 1..10: mol_type = other DNA
ccggtcgacg

SEQ ID NO: 2124 - DNA, 10 bp, synthetic construct
  source 1..10: mol_type = other DNA
agctatcaac

SEQ ID NO: 2125 - DNA, 10 bp, synthetic construct
  source 1..10: mol_type = other DNA
accaacgctg

SEQ ID NO: 2126 - DNA, 10 bp, synthetic construct
  source 1..10: mol_type = other DNA
caatgccgat

SEQ ID NO: 2127 - DNA, 10 bp, synthetic construct
  source 1..10: mol_type = other DNA
taggactacc

SEQ ID NO: 2128 - DNA, 10 bp, synthetic construct
  source 1..10: mol_type = other DNA
cgcgatgcta

SEQ ID NO: 2129 - DNA, 10 bp, synthetic construct
  source 1..10: mol_type = other DNA
ggttaccagt

SEQ ID NO: 2130 - DNA, 10 bp, synthetic construct
  source 1..10: mol_type = other DNA
ggtcagtaga

SEQ ID NO: 2131 - DNA, 10 bp, synthetic construct
  source 1..10: mol_type = other DNA
ataactcttg

SEQ ID NO: 2132 - DNA, 10 bp, synthetic construct
  source 1..10: mol_type = other DNA
ttcctaattg

SEQ ID NO: 2133 - DNA, 10 bp, synthetic construct
  source 1..10: mol_type = other DNA
ggttccgcaa

SEQ ID NO: 2134 - DNA, 10 bp, synthetic construct
  source 1..10: mol_type = other DNA
tacttcggct

SEQ ID NO: 2135 - DNA, 10 bp, synthetic construct
  source 1..10: mol_type = other DNA
cgtacggacc

SEQ ID NO: 2136 - DNA, 10 bp, synthetic construct
  source 1..10: mol_type = other DNA
cttgcatgct

SEQ ID NO: 2137 - DNA, 10 bp, synthetic construct
  source 1..10: mol_type = other DNA
gcaacgaaga

SEQ ID NO: 2138 - DNA, 10 bp, synthetic construct
  source 1..10: mol_type = other DNA
ttcttccaac

SEQ ID NO: 2139 - DNA, 10 bp, synthetic construct
  source 1..10: mol_type = other DNA
tccgtattcc

SEQ ID NO: 2140 - DNA, 10 bp, synthetic construct
  source 1..10: mol_type = other DNA
taccgtcggt

SEQ ID NO: 2141 - DNA, 10 bp, synthetic construct
  source 1..10: mol_type = other DNA
aatcaagtat

SEQ ID NO: 2142 - DNA, 10 bp, synthetic construct
  source 1..10: mol_type = other DNA
ggcgaacgac

SEQ ID NO: 2143 - DNA, 10 bp, synthetic construct
  source 1..10: mol_type = other DNA
tgcaatcatt

SEQ ID NO: 2144 - DNA, 10 bp, synthetic construct
  source 1..10: mol_type = other DNA
ctgctaatgg

SEQ ID NO: 2145 - DNA, 10 bp, synthetic construct
  source 1..10: mol_type = other DNA
cattagtcag

SEQ ID NO: 2146 - DNA, 10 bp, synthetic construct
  source 1..10: mol_type = other DNA
gtccgtaagg

SEQ ID NO: 2147 - DNA, 10 bp, synthetic construct
  source 1..10: mol_type = other DNA
tagttatgcg

SEQ ID NO: 2148 - DNA, 10 bp, synthetic construct
  source 1..10: mol_type = other DNA
tcctccggtt

SEQ ID NO: 2149 - DNA, 10 bp, synthetic construct
  source 1..10: mol_type = other DNA
ccgctgcatt

SEQ ID NO: 2150 - DNA, 10 bp, synthetic construct
  source 1..10: mol_type = other DNA
ttgccgactg

SEQ ID NO: 2151 - DNA, 10 bp, synthetic construct
  source 1..10: mol_type = other DNA
tggattctat

SEQ ID NO: 2152 - DNA, 10 bp, synthetic construct
  source 1..10: mol_type = other DNA
atatctgaga

SEQ ID NO: 2153 - DNA, 10 bp, synthetic construct
  source 1..10: mol_type = other DNA
aatacttcgt

SEQ ID NO: 2154 - DNA, 10 bp, synthetic construct
  source 1..10: mol_type = other DNA
tgataagtct

SEQ ID NO: 2155 - DNA, 10 bp, synthetic construct
  source 1..10: mol_type = other DNA
tacggcgcga

SEQ ID NO: 2156 - DNA, 10 bp, synthetic construct
  source 1..10: mol_type = other DNA
tcttcaagct

SEQ ID NO: 2157 - DNA, 10 bp, synthetic construct
  source 1..10: mol_type = other DNA
gtagctaccg

SEQ ID NO: 2158 - DNA, 10 bp, synthetic construct
  source 1..10: mol_type = other DNA
cgcatgccgc

SEQ ID NO: 2159 - DNA, 10 bp, synthetic construct
  source 1..10: mol_type = other DNA
agccagtctt

SEQ ID NO: 2160 - DNA, 10 bp, synthetic construct
  source 1..10: mol_type = other DNA
taagaatgcg

SEQ ID NO: 2161 - DNA, 10 bp, synthetic construct
  source 1..10: mol_type = other DNA
ggagacggta

SEQ ID NO: 2162 - DNA, 10 bp, synthetic construct
  source 1..10: mol_type = other DNA
atactatatt

SEQ ID NO: 2163 - DNA, 10 bp, synthetic construct
  source 1..10: mol_type = other DNA
atcttatgat

SEQ ID NO: 2164 - DNA, 10 bp, synthetic construct
  source 1..10: mol_type = other DNA
ggatattgat

SEQ ID NO: 2165 - DNA, 10 bp, synthetic construct
  source 1..10: mol_type = other DNA
gttggtaata

SEQ ID NO: 2166 - DNA, 10 bp, synthetic construct
  source 1..10: mol_type = other DNA
tggtcttctc

SEQ ID NO: 2167 - DNA, 10 bp, synthetic construct
  source 1..10: mol_type = other DNA
gagagcgcca

SEQ ID NO: 2168 - DNA, 10 bp, synthetic construct
  source 1..10: mol_type = other DNA
ttatcgtcgc

SEQ ID NO: 2169 - DNA, 10 bp, synthetic construct
  source 1..10: mol_type = other DNA
tcgcgacgtt

SEQ ID NO: 2170 - DNA, 10 bp, synthetic construct
  source 1..10: mol_type = other DNA
gaagcttcat

SEQ ID NO: 2171 - DNA, 10 bp, synthetic construct
  source 1..10: mol_type = other DNA
actctatggc

SEQ ID NO: 2172 - DNA, 10 bp, synthetic construct
  source 1..10: mol_type = other DNA
ttctcagtca

SEQ ID NO: 2173 - DNA, 10 bp, synthetic construct
  source 1..10: mol_type = other DNA
ttcggagccg

SEQ ID NO: 2174 - DNA, 10 bp, synthetic construct
  source 1..10: mol_type = other DNA
caattggctg

SEQ ID NO: 2175 - DNA, 10 bp, synthetic construct
  source 1..10: mol_type = other DNA
aactggtcgc

SEQ ID NO: 2176 - DNA, 10 bp, synthetic construct
  source 1..10: mol_type = other DNA
cgtcgttagg

SEQ ID NO: 2177 - DNA, 10 bp, synthetic construct
  source 1..10: mol_type = other DNA
gattgcgaag

SEQ ID NO: 2178 - DNA, 10 bp, synthetic construct
  source 1..10: mol_type = other DNA
aacggagtca

SEQ ID NO: 2179 - DNA, 10 bp, synthetic construct
  source 1..10: mol_type = other DNA
agcgactatc

SEQ ID NO: 2180 - DNA, 10 bp, synthetic construct
  source 1..10: mol_type = other DNA
ttagtacctt

SEQ ID NO: 2181 - DNA, 10 bp, synthetic construct
  source 1..10: mol_type = other DNA
cctcatgcaa

SEQ ID NO: 2182 - DNA, 10 bp, synthetic construct
  source 1..10: mol_type = other DNA
tatataatac

SEQ ID NO: 2183 - DNA, 10 bp, synthetic construct
  source 1..10: mol_type = other DNA
agccaagaat

SEQ ID NO: 2184 - DNA, 10 bp, synthetic construct
  source 1..10: mol_type = other DNA
ccaagatgca

SEQ ID NO: 2185 - DNA, 10 bp, synthetic construct
  source 1..10: mol_type = other DNA
ttgagccaac

SEQ ID NO: 2186 - DNA, 10 bp, synthetic construct
  source 1..10: mol_type = other DNA
taatgatatt

SEQ ID NO: 2187 - DNA, 10 bp, synthetic construct
  source 1..10: mol_type = other DNA
gacttagtta

SEQ ID NO: 2188 - DNA, 10 bp, synthetic construct
  source 1..10: mol_type = other DNA
ttggttattg

SEQ ID NO: 2189 - DNA, 10 bp, synthetic construct
  source 1..10: mol_type = other DNA
tgcagtataa

SEQ ID NO: 2190 - DNA, 10 bp, synthetic construct
  source 1..10: mol_type = other DNA
gctctgctca

SEQ ID NO: 2191 - DNA, 10 bp, synthetic construct
  source 1..10: mol_type = other DNA
ttggcttgca

SEQ ID NO: 2192 - DNA, 10 bp, synthetic construct
  source 1..10: mol_type = other DNA
tcgttctcca

SEQ ID NO: 2193 - DNA, 10 bp, synthetic construct
  source 1..10: mol_type = other DNA
tgaatccgat

SEQ ID NO: 2194 - DNA, 10 bp, synthetic construct
  source 1..10: mol_type = other DNA
tcggtctagt

SEQ ID NO: 2195 - DNA, 10 bp, synthetic construct
  source 1..10: mol_type = other DNA
aagcatctcg

SEQ ID NO: 2196 - DNA, 10 bp, synthetic construct
  source 1..10: mol_type = other DNA
attaatagaa

SEQ ID NO: 2197 - DNA, 10 bp, synthetic construct
  source 1..10: mol_type = other DNA
tggactaatt

SEQ ID NO: 2198 - DNA, 10 bp, synthetic construct
  source 1..10: mol_type = other DNA
ggcttggagc

SEQ ID NO: 2199 - DNA, 10 bp, synthetic construct
  source 1..10: mol_type = other DNA
ttaggaagag

SEQ ID NO: 2200 - DNA, 10 bp, synthetic construct
  source 1..10: mol_type = other DNA
gttaacgcgg

SEQ ID NO: 2201 - DNA, 10 bp, synthetic construct
  source 1..10: mol_type = other DNA
ctattccgtc

SEQ ID NO: 2202 - DNA, 10 bp, synthetic construct
  source 1..10: mol_type = other DNA
caactctgag

SEQ ID NO: 2203 - DNA, 10 bp, synthetic construct
  source 1..10: mol_type = other DNA
tcatacgtcc

SEQ ID NO: 2204 - DNA, 10 bp, synthetic construct
  source 1..10: mol_type = other DNA
gactcatctt

SEQ ID NO: 2205 - DNA, 10 bp, synthetic construct
  source 1..10: mol_type = other DNA
ggtagcgcat

SEQ ID NO: 2206 - DNA, 10 bp, synthetic construct
  source 1..10: mol_type = other DNA
ttaggcgtcc

SEQ ID NO: 2207 - DNA, 10 bp, synthetic construct
  source 1..10: mol_type = other DNA
ggtctaactg

SEQ ID NO: 2208 - DNA, 10 bp, synthetic construct
  source 1..10: mol_type = other DNA
attgagacgg

SEQ ID NO: 2209 - DNA, 10 bp, synthetic construct
  source 1..10: mol_type = other DNA
aacgtaccat

SEQ ID NO: 2210 - DNA, 10 bp, synthetic construct
  source 1..10: mol_type = other DNA
gttcagttac

SEQ ID NO: 2211 - DNA, 10 bp, synthetic construct
  source 1..10: mol_type = other DNA
gttaacctta

SEQ ID NO: 2212 - DNA, 10 bp, synthetic construct
  source 1..10: mol_type = other DNA
ggagtagtag

SEQ ID NO: 2213 - DNA, 10 bp, synthetic construct
  source 1..10: mol_type = other DNA
caggttgaga

SEQ ID NO: 2214 - DNA, 10 bp, synthetic construct
  source 1..10: mol_type = other DNA
aaccaataac

SEQ ID NO: 2215 - DNA, 10 bp, synthetic construct
  source 1..10: mol_type = other DNA
ggtacctatt

SEQ ID NO: 2216 - DNA, 10 bp, synthetic construct
  source 1..10: mol_type = other DNA
agctgcctca

SEQ ID NO: 2217 - DNA, 10 bp, synthetic construct
  source 1..10: mol_type = other DNA
ttggttggta

SEQ ID NO: 2218 - DNA, 10 bp, synthetic construct
  source 1..10: mol_type = other DNA
ctgatatcgg

SEQ ID NO: 2219 - DNA, 10 bp, synthetic construct
  source 1..10: mol_type = other DNA
ttgatggaac

SEQ ID NO: 2220 - DNA, 10 bp, synthetic construct
  source 1..10: mol_type = other DNA
ggaccagaag

SEQ ID NO: 2221 - DNA, 10 bp, synthetic construct
  source 1..10: mol_type = other DNA
acctgaggtc

SEQ ID NO: 2222 - DNA, 10 bp, synthetic construct
  source 1..10: mol_type = other DNA
ttgcaatgag

SEQ ID NO: 2223 - DNA, 10 bp, synthetic construct
  source 1..10: mol_type = other DNA
actaactgac

SEQ ID NO: 2224 - DNA, 10 bp, synthetic construct
  source 1..10: mol_type = other DNA
ggtaagaggt

SEQ ID NO: 2225 - DNA, 10 bp, synthetic construct
  source 1..10: mol_type = other DNA
gtaatcgcaa

SEQ ID NO: 2226 - DNA, 10 bp, synthetic construct
  source 1..10: mol_type = other DNA
atatgatgaa

SEQ ID NO: 2227 - DNA, 10 bp, synthetic construct
  source 1..10: mol_type = other DNA
cctacggaag

SEQ ID NO: 2228 - DNA, 10 bp, synthetic construct
  source 1..10: mol_type = other DNA
gactctccga

SEQ ID NO: 2229 - DNA, 10 bp, synthetic construct
  source 1..10: mol_type = other DNA
atagatacgt

SEQ ID NO: 2230 - DNA, 10 bp, synthetic construct
  source 1..10: mol_type = other DNA
tatgaagcaa

SEQ ID NO: 2231 - DNA, 10 bp, synthetic construct
  source 1..10: mol_type = other DNA
gtagagacga

SEQ ID NO: 2232 - DNA, 10 bp, synthetic construct
  source 1..10: mol_type = other DNA
ttcgcataac

SEQ ID NO: 2233 - DNA, 10 bp, synthetic construct
  source 1..10: mol_type = other DNA
tagattcgcc

SEQ ID NO: 2234 - DNA, 10 bp, synthetic construct
  source 1..10: mol_type = other DNA
ttcttcgcgg

SEQ ID NO: 2235 - DNA, 10 bp, synthetic construct
  source 1..10: mol_type = other DNA
ttcttggtct

SEQ ID NO: 2236 - DNA, 10 bp, synthetic construct
  source 1..10: mol_type = other DNA
gtatagatta

SEQ ID NO: 2237 - DNA, 10 bp, synthetic construct
  source 1..10: mol_type = other DNA
gactatgact

SEQ ID NO: 2238 - DNA, 10 bp, synthetic construct
  source 1..10: mol_type = other DNA
gctccgcgaa

SEQ ID NO: 2239 - DNA, 10 bp, synthetic construct
  source 1..10: mol_type = other DNA
ggaacgattc

SEQ ID NO: 2240 - DNA, 10 bp, synthetic construct
  source 1..10: mol_type = other DNA
gtaccttcgt

SEQ ID NO: 2241 - DNA, 10 bp, synthetic construct
  source 1..10: mol_type = other DNA
ttatgcgact

SEQ ID NO: 2242 - DNA, 10 bp, synthetic construct
  source 1..10: mol_type = other DNA
aacggttggt

SEQ ID NO: 2243 - DNA, 10 bp, synthetic construct
  source 1..10: mol_type = other DNA
ctagaaggaa

SEQ ID NO: 2244 - DNA, 10 bp, synthetic construct
  source 1..10: mol_type = other DNA
gtatggagga

SEQ ID NO: 2245 - DNA, 10 bp, synthetic construct
  source 1..10: mol_type = other DNA
cgtaagtagc

SEQ ID NO: 2246 - DNA, 10 bp, synthetic construct
  source 1..10: mol_type = other DNA
tagtcgtcaa

SEQ ID NO: 2247 - DNA, 10 bp, synthetic construct
  source 1..10: mol_type = other DNA
gtagtatgga

SEQ ID NO: 2248 - DNA, 10 bp, synthetic construct
  source 1..10: mol_type = other DNA
aatggacgta

SEQ ID NO: 2249 - DNA, 10 bp, synthetic construct
  source 1..10: mol_type = other DNA
ccgttcgctg

SEQ ID NO: 2250 - DNA, 10 bp, synthetic construct
  source 1..10: mol_type = other DNA
cagtcaatat

SEQ ID NO: 2251 - DNA, 10 bp, synthetic construct
  source 1..10: mol_type = other DNA
gtcggactga

SEQ ID NO: 2252 - DNA, 10 bp, synthetic construct
  source 1..10: mol_type = other DNA
ttccatgcgc

SEQ ID NO: 2253 - DNA, 10 bp, synthetic construct
  source 1..10: mol_type = other DNA
ggacggcatg

SEQ ID NO: 2254 - DNA, 10 bp, synthetic construct
  source 1..10: mol_type = other DNA
ggagcaacgt

SEQ ID NO: 2255 - DNA, 10 bp, synthetic construct
  source 1..10: mol_type = other DNA
cgtcctagct

SEQ ID NO: 2256 - DNA, 10 bp, synthetic construct
  source 1..10: mol_type = other DNA
atattagtag

SEQ ID NO: 2257 - DNA, 10 bp, synthetic construct
  source 1..10: mol_type = other DNA
agttccttct

SEQ ID NO: 2258 - DNA, 10 bp, synthetic construct
  source 1..10: mol_type = other DNA
gccttcaagg

SEQ ID NO: 2259 - DNA, 10 bp, synthetic construct
  source 1..10: mol_type = other DNA
taacgcctca

SEQ ID NO: 2260 - DNA, 10 bp, synthetic construct
  source 1..10: mol_type = other DNA
gaatacgtct

SEQ ID NO: 2261 - DNA, 10 bp, synthetic construct
  source 1..10: mol_type = other DNA
gatgagcctt

SEQ ID NO: 2262 - DNA, 10 bp, synthetic construct
  source 1..10: mol_type = other DNA
tacggagact

SEQ ID NO: 2263 - DNA, 10 bp, synthetic construct
  source 1..10: mol_type = other DNA
agaggtcatt

SEQ ID NO: 2264 - DNA, 10 bp, synthetic construct
  source 1..10: mol_type = other DNA
cggccagtta

SEQ ID NO: 2265 - DNA, 10 bp, synthetic construct
  source 1..10: mol_type = other DNA
tagcgcttaa

SEQ ID NO: 2266 - DNA, 10 bp, synthetic construct
  source 1..10: mol_type = other DNA
caaccttatg

SEQ ID NO: 2267 - DNA, 10 bp, synthetic construct
  source 1..10: mol_type = other DNA
cttcgacgaa

SEQ ID NO: 2268 - DNA, 10 bp, synthetic construct
  source 1..10: mol_type = other DNA
agagtccgag

SEQ ID NO: 2269 - DNA, 10 bp, synthetic construct
  source 1..10: mol_type = other DNA
ctatggttcg

SEQ ID NO: 2270 - DNA, 10 bp, synthetic construct
  source 1..10: mol_type = other DNA
aactattggc

SEQ ID NO: 2271 - DNA, 10 bp, synthetic construct
  source 1..10: mol_type = other DNA
cttgcgaggt

SEQ ID NO: 2272 - DNA, 10 bp, synthetic construct
  source 1..10: mol_type = other DNA
ttcggctcgt

SEQ ID NO: 2273 - DNA, 10 bp, synthetic construct
  source 1..10: mol_type = other DNA
ctcaagtctg

SEQ ID NO: 2274 - DNA, 10 bp, synthetic construct
  source 1..10: mol_type = other DNA
attaggcctg

SEQ ID NO: 2275 - DNA, 10 bp, synthetic construct
  source 1..10: mol_type = other DNA
tggctaacgt

SEQ ID NO: 2276 - DNA, 10 bp, synthetic construct
  source 1..10: mol_type = other DNA
agctaatatt

SEQ ID NO: 2277 - DNA, 10 bp, synthetic construct
  source 1..10: mol_type = other DNA
aggaatcttc

SEQ ID NO: 2278 - DNA, 10 bp, synthetic construct
  source 1..10: mol_type = other DNA
aagaccagac

SEQ ID NO: 2279 - DNA, 10 bp, synthetic construct
  source 1..10: mol_type = other DNA
accataagcg

SEQ ID NO: 2280 - DNA, 10 bp, synthetic construct
  source 1..10: mol_type = other DNA
tgcttattac

SEQ ID NO: 2281 - DNA, 10 bp, synthetic construct
  source 1..10: mol_type = other DNA
atagagcatt

SEQ ID NO: 2282 - DNA, 10 bp, synthetic construct
  source 1..10: mol_type = other DNA
aattatcttg

SEQ ID NO: 2283 - DNA, 10 bp, synthetic construct
  source 1..10: mol_type = other DNA
gttccgcgcg

SEQ ID NO: 2284 - DNA, 10 bp, synthetic construct
  source 1..10: mol_type = other DNA
ccgaagtccg

SEQ ID NO: 2285 - DNA, 10 bp, synthetic construct
  source 1..10: mol_type = other DNA
ttaccatgat

SEQ ID NO: 2286 - DNA, 10 bp, synthetic construct
  source 1..10: mol_type = other DNA
tatagatggc

SEQ ID NO: 2287 - DNA, 10 bp, synthetic construct
  source 1..10: mol_type = other DNA
gcatatctgg

SEQ ID NO: 2288 - DNA, 10 bp, synthetic construct
  source 1..10: mol_type = other DNA
actctagaag

SEQ ID NO: 2289 - DNA, 10 bp, synthetic construct
  source 1..10: mol_type = other DNA
caagaatatg

SEQ ID NO: 2290 - DNA, 10 bp, synthetic construct
  source 1..10: mol_type = other DNA
ctgctgcgcg

SEQ ID NO: 2291 - DNA, 10 bp, synthetic construct
  source 1..10: mol_type = other DNA
catattacgg

SEQ ID NO: 2292 - DNA, 10 bp, synthetic construct
  source 1..10: mol_type = other DNA
cggcggaatg

SEQ ID NO: 2293 - DNA, 10 bp, synthetic construct
  source 1..10: mol_type = other DNA
tgcttctgaa

SEQ ID NO: 2294 - DNA, 10 bp, synthetic construct
  source 1..10: mol_type = other DNA
gtattcttct

SEQ ID NO: 2295 - DNA, 10 bp, synthetic construct
  source 1..10: mol_type = other DNA
cagtagtaat

SEQ ID NO: 2296 - DNA, 10 bp, synthetic construct
  source 1..10: mol_type = other DNA
ccgcggagac

SEQ ID NO: 2297 - DNA, 10 bp, synthetic construct
  source 1..10: mol_type = other DNA
gctcgtcggc

SEQ ID NO: 2298 - DNA, 10 bp, synthetic construct
  source 1..10: mol_type = other DNA
cttagaggca

SEQ ID NO: 2299 - DNA, 10 bp, synthetic construct
  source 1..10: mol_type = other DNA
gaccaagacg

SEQ ID NO: 2300 - DNA, 10 bp, synthetic construct
  source 1..10: mol_type = other DNA
agcagatggt

SEQ ID NO: 2301 - DNA, 10 bp, synthetic construct
  source 1..10: mol_type = other DNA
aattaaccat

SEQ ID NO: 2302 - DNA, 10 bp, synthetic construct
  source 1..10: mol_type = other DNA
cagactcgct

SEQ ID NO: 2303 - DNA, 10 bp, synthetic construct
  source 1..10: mol_type = other DNA
cttcgccgtt

SEQ ID NO: 2304 - DNA, 10 bp, synthetic construct
  source 1..10: mol_type = other DNA
cctgccaacc

SEQ ID NO: 2305 - DNA, 57 bp, synthetic construct
  source 1..57: mol_type = other DNA
acgacgctcttccgatctnnnnnnnnttctcgcatgcaagttgataacggactagcc

SEQ ID NO: 2306 - DNA, 57 bp, synthetic construct
  source 1..57: mol_type = other DNA
acgacgctcttccgatctnnnnnnnntcctaccagtcaagttgataacggactagcc

SEQ ID NO: 2307 - DNA, 57 bp, synthetic construct
  source 1..57: mol_type = other DNA
acgacgctcttccgatctnnnnnnnngcgttggagccaagttgataacggactagcc

SEQ ID NO: 2308 - DNA, 57 bp, synthetic construct
  source 1..57: mol_type = other DNA
acgacgctcttccgatctnnnnnnnngatcttacgccaagttgataacggactagcc

SEQ ID NO: 2309 - DNA, 57 bp, synthetic construct
  source 1..57: mol_type = other DNA
acgacgctcttccgatctnnnnnnnnctgatggtcacaagttgataacggactagcc

SEQ ID NO: 2310 - DNA, 57 bp, synthetic construct
  source 1..57: mol_type = other DNA
acgacgctcttccgatctnnnnnnnnccgagaatcccaagttgataacggactagcc

SEQ ID NO: 2311 - DNA, 57 bp, synthetic construct
  source 1..57: mol_type = other DNA
acgacgctcttccgatctnnnnnnnngccgcaacgacaagttgataacggactagcc

SEQ ID NO: 2312 - DNA, 57 bp, synthetic construct
  source 1..57: mol_type = other DNA
acgacgctcttccgatctnnnnnnnntgagtctggccaagttgataacggactagcc

SEQ ID NO: 2313 - DNA, 57 bp, synthetic construct
  source 1..57: mol_type = other DNA
acgacgctcttccgatctnnnnnnnntgcggacctacaagttgataacggactagcc

SEQ ID NO: 2314 - DNA, 57 bp, synthetic construct
  source 1..57: mol_type = other DNA
acgacgctcttccgatctnnnnnnnnacctcgttgacaagttgataacggactagcc

SEQ ID NO: 2315 - DNA, 57 bp, synthetic construct
  source 1..57: mol_type = other DNA
acgacgctcttccgatctnnnnnnnnacggaggcggcaagttgataacggactagcc

SEQ ID NO: 2316 - DNA, 57 bp, synthetic construct
  source 1..57: mol_type = other DNA
acgacgctcttccgatctnnnnnnnntagatctactcaagttgataacggactagcc

SEQ ID NO: 2317 - DNA, 57 bp, synthetic construct
  source 1..57: mol_type = other DNA
acgacgctcttccgatctnnnnnnnnaattaagactcaagttgataacggactagcc

SEQ ID NO: 2318 - DNA, 57 bp, synthetic construct
  source 1..57: mol_type = other DNA
acgacgctcttccgatctnnnnnnnnccattgcgttcaagttgataacggactagcc

SEQ ID NO: 2319 - DNA, 57 bp, synthetic construct
  source 1..57: mol_type = other DNA
acgacgctcttccgatctnnnnnnnnttattcattccaagttgataacggactagcc

SEQ ID NO: 2320 - DNA, 57 bp, synthetic construct
  source 1..57: mol_type = other DNA
acgacgctcttccgatctnnnnnnnnatctccgaaccaagttgataacggactagcc

SEQ ID NO: 2321 - DNA, 57 bp, synthetic construct
  source 1..57: mol_type = other DNA
acgacgctcttccgatctnnnnnnnnttgacttcagcaagttgataacggactagcc

SEQ ID NO: 2322 - DNA, 57 bp, synthetic construct
  source 1..57: mol_type = other DNA
acgacgctcttccgatctnnnnnnnnggcaggtattcaagttgataacggactagcc

SEQ ID NO: 2323 - DNA, 57 bp, synthetic construct
  source 1..57: mol_type = other DNA
acgacgctcttccgatctnnnnnnnnagagctataacaagttgataacggactagcc

SEQ ID NO: 2324 - DNA, 57 bp, synthetic construct
  source 1..57: mol_type = other DNA
acgacgctcttccgatctnnnnnnnnctaagagaagcaagttgataacggactagcc

SEQ ID NO: 2325 - DNA, 57 bp, synthetic construct
  source 1..57: mol_type = other DNA
acgacgctcttccgatctnnnnnnnnactcaataggcaagttgataacggactagcc

SEQ ID NO: 2326 - DNA, 57 bp, synthetic construct
  source 1..57: mol_type = other DNA
acgacgctcttccgatctnnnnnnnncttgcgccgccaagttgataacggactagcc

SEQ ID NO: 2327 - DNA, 57 bp, synthetic construct
  source 1..57: mol_type = other DNA
acgacgctcttccgatctnnnnnnnnaatcgtagcgcaagttgataacggactagcc

SEQ ID NO: 2328 - DNA, 57 bp, synthetic construct
  source 1..57: mol_type = other DNA
acgacgctcttccgatctnnnnnnnnggtactgcctcaagttgataacggactagcc

SEQ ID NO: 2329 - DNA, 57 bp, synthetic construct
  source 1..57: mol_type = other DNA
acgacgctcttccgatctnnnnnnnntagaattaaccaagttgataacggactagcc

SEQ ID NO: 2330 - DNA, 57 bp, synthetic construct
  source 1..57: mol_type = other DNA
acgacgctcttccgatctnnnnnnnngccattctcccaagttgataacggactagcc

SEQ ID NO: 2331 - DNA, 57 bp, synthetic construct
  source 1..57: mol_type = other DNA
acgacgctcttccgatctnnnnnnnntgccggcagacaagttgataacggactagcc

SEQ ID NO: 2332 - DNA, 57 bp, synthetic construct
  source 1..57: mol_type = other DNA
acgacgctcttccgatctnnnnnnnnttaccgaggccaagttgataacggactagcc

SEQ ID NO: 2333 - DNA, 57 bp, synthetic construct
  source 1..57: mol_type = other DNA
acgacgctcttccgatctnnnnnnnnatcatattagcaagttgataacggactagcc

SEQ ID NO: 2334 - DNA, 57 bp, synthetic construct
  source 1..57: mol_type = other DNA
acgacgctcttccgatctnnnnnnnntggtcagccacaagttgataacggactagcc

SEQ ID NO: 2335 - DNA, 57 bp, synthetic construct
  source 1..57: mol_type = other DNA
acgacgctcttccgatctnnnnnnnnactatgcaatcaagttgataacggactagcc

SEQ ID NO: 2336 - DNA, 57 bp, synthetic construct
  source 1..57: mol_type = other DNA
acgacgctcttccgatctnnnnnnnncgacgcgactcaagttgataacggactagcc

SEQ ID NO: 2337 - DNA, 57 bp, synthetic construct
  source 1..57: mol_type = other DNA
acgacgctcttccgatctnnnnnnnngatacggaaccaagttgataacggactagcc

SEQ ID NO: 2338 - DNA, 57 bp, synthetic construct
  source 1..57: mol_type = other DNA
acgacgctcttccgatctnnnnnnnnttatccggatcaagttgataacggactagcc

SEQ ID NO: 2339 - DNA, 57 bp, synthetic construct
  source 1..57: mol_type = other DNA
acgacgctcttccgatctnnnnnnnntagagtaatacaagttgataacggactagcc

SEQ ID NO: 2340 - DNA, 57 bp, synthetic construct
  source 1..57: mol_type = other DNA
acgacgctcttccgatctnnnnnnnngcaggtccgtcaagttgataacggactagcc

SEQ ID NO: 2341 - DNA, 57 bp, synthetic construct
  source 1..57: mol_type = other DNA
acgacgctcttccgatctnnnnnnnntcggccttaccaagttgataacggactagcc

SEQ ID NO: 2342 - DNA, 57 bp, synthetic construct
  source 1..57: mol_type = other DNA
acgacgctcttccgatctnnnnnnnnagaacgtctccaagttgataacggactagcc

SEQ ID NO: 2343 - DNA, 57 bp, synthetic construct
  source 1..57: mol_type = other DNA
acgacgctcttccgatctnnnnnnnnccagttccaacaagttgataacggactagcc

SEQ ID NO: 2344 - DNA, 57 bp, synthetic construct
  source 1..57: mol_type = other DNA
acgacgctcttccgatctnnnnnnnnggcgttaaggcaagttgataacggactagcc

SEQ ID NO: 2345 - DNA, 57 bp, synthetic construct
  source 1..57: mol_type = other DNA
acgacgctcttccgatctnnnnnnnnacttaaccttcaagttgataacggactagcc

SEQ ID NO: 2346 - DNA, 57 bp, synthetic construct
  source 1..57: mol_type = other DNA
acgacgctcttccgatctnnnnnnnncaaccgctaacaagttgataacggactagcc

SEQ ID NO: 2347 - DNA, 57 bp, synthetic construct
  source 1..57: mol_type = other DNA
acgacgctcttccgatctnnnnnnnngaccttgatacaagttgataacggactagcc

SEQ ID NO: 2348 - DNA, 57 bp, synthetic construct
  source 1..57: mol_type = other DNA
acgacgctcttccgatctnnnnnnnntctgataccacaagttgataacggactagcc

SEQ ID NO: 2349 - DNA, 57 bp, synthetic construct
  source 1..57: mol_type = other DNA
acgacgctcttccgatctnnnnnnnngaagatcgagcaagttgataacggactagcc

SEQ ID NO: 2350 - DNA, 57 bp, synthetic construct
  source 1..57: mol_type = other DNA
acgacgctcttccgatctnnnnnnnnaggagcggtacaagttgataacggactagcc

SEQ ID NO: 2351 - DNA, 57 bp, synthetic construct
  source 1..57: mol_type = other DNA
acgacgctcttccgatctnnnnnnnnaagaagctagcaagttgataacggactagcc

SEQ ID NO: 2352 - DNA, 57 bp, synthetic construct
  source 1..57: mol_type = other DNA
acgacgctcttccgatctnnnnnnnntccggcctcgcaagttgataacggactagcc

SEQ ID NO: 2353 - DNA, 57 bp, synthetic construct
  source 1..57: mol_type = other DNA
acgacgctcttccgatctnnnnnnnnagagaaggttcaagttgataacggactagcc

SEQ ID NO: 2354 - DNA, 57 bp, synthetic construct
  source 1..57: mol_type = other DNA
acgacgctcttccgatctnnnnnnnncatactccgacaagttgataacggactagcc

SEQ ID NO: 2355 - DNA, 57 bp, synthetic construct
  source 1..57: mol_type = other DNA
acgacgctcttccgatctnnnnnnnngctaacttgccaagttgataacggactagcc

SEQ ID NO: 2356 - DNA, 57 bp, synthetic construct
  source 1..57: mol_type = other DNA
acgacgctcttccgatctnnnnnnnnaatccatcttcaagttgataacggactagcc

SEQ ID NO: 2357 - DNA, 57 bp, synthetic construct
  source 1..57: mol_type = other DNA
acgacgctcttccgatctnnnnnnnnggctgagctccaagttgataacggactagcc

SEQ ID NO: 2358 - DNA, 57 bp, synthetic construct
  source 1..57: mol_type = other DNA
acgacgctcttccgatctnnnnnnnnccgattcctgcaagttgataacggactagcc

SEQ ID NO: 2359 - DNA, 57 bp, synthetic construct
  source 1..57: mol_type = other DNA
acgacgctcttccgatctnnnnnnnnaccgccaacccaagttgataacggactagcc

SEQ ID NO: 2360 - DNA, 57 bp, synthetic construct
  source 1..57: mol_type = other DNA
acgacgctcttccgatctnnnnnnnntggcctgaagcaagttgataacggactagcc

SEQ ID NO: 2361 - DNA, 57 bp, synthetic construct
  source 1..57: mol_type = other DNA
acgacgctcttccgatctnnnnnnnnaacctcattccaagttgataacggactagcc

SEQ ID NO: 2362 - DNA, 57 bp, synthetic construct
  source 1..57: mol_type = other DNA
acgacgctcttccgatctnnnnnnnnataaggagcacaagttgataacggactagcc

SEQ ID NO: 2363 - DNA, 57 bp, synthetic construct
  source 1..57: mol_type = other DNA
acgacgctcttccgatctnnnnnnnncgaacgccggcaagttgataacggactagcc

SEQ ID NO: 2364 - DNA, 57 bp, synthetic construct
  source 1..57: mol_type = other DNA
acgacgctcttccgatctnnnnnnnnggtatgcttgcaagttgataacggactagcc

SEQ ID NO: 2365 - DNA, 57 bp, synthetic construct
  source 1..57: mol_type = other DNA
acgacgctcttccgatctnnnnnnnnaacctgcgtacaagttgataacggactagcc

SEQ ID NO: 2366 - DNA, 57 bp, synthetic construct
  source 1..57: mol_type = other DNA
acgacgctcttccgatctnnnnnnnnggcagacgcccaagttgataacggactagcc

SEQ ID NO: 2367 - DNA, 57 bp, synthetic construct
  source 1..57: mol_type = other DNA
acgacgctcttccgatctnnnnnnnntagccgtcatcaagttgataacggactagcc

SEQ ID NO: 2368 - DNA, 57 bp, synthetic construct
  source 1..57: mol_type = other DNA
acgacgctcttccgatctnnnnnnnncctggaagagcaagttgataacggactagcc

SEQ ID NO: 2369 - DNA, 57 bp, synthetic construct
  source 1..57: mol_type = other DNA
acgacgctcttccgatctnnnnnnnnggaggttctacaagttgataacggactagcc

SEQ ID NO: 2370 - DNA, 57 bp, synthetic construct
  source 1..57: mol_type = other DNA
acgacgctcttccgatctnnnnnnnnctagtagtctcaagttgataacggactagcc

SEQ ID NO: 2371 - DNA, 57 bp, synthetic construct
  source 1..57: mol_type = other DNA
acgacgctcttccgatctnnnnnnnnatcatcaacgcaagttgataacggactagcc

SEQ ID NO: 2372 - DNA, 57 bp, synthetic construct
  source 1..57: mol_type = other DNA
acgacgctcttccgatctnnnnnnnnacgcgagattcaagttgataacggactagcc

SEQ ID NO: 2373 - DNA, 57 bp, synthetic construct
  source 1..57: mol_type = other DNA
acgacgctcttccgatctnnnnnnnngaagaggcatcaagttgataacggactagcc

SEQ ID NO: 2374 - DNA, 57 bp, synthetic construct
  source 1..57: mol_type = other DNA
acgacgctcttccgatctnnnnnnnnggtatccgcccaagttgataacggactagcc

SEQ ID NO: 2375 - DNA, 57 bp, synthetic construct
  source 1..57: mol_type = other DNA
acgacgctcttccgatctnnnnnnnnaactaggcgccaagttgataacggactagcc

SEQ ID NO: 2376 - DNA, 57 bp, synthetic construct
  source 1..57: mol_type = other DNA
acgacgctcttccgatctnnnnnnnntcgctaagcacaagttgataacggactagcc

SEQ ID NO: 2377 - DNA, 57 bp, synthetic construct
  source 1..57: mol_type = other DNA
acgacgctcttccgatctnnnnnnnntatatactaacaagttgataacggactagcc

SEQ ID NO: 2378 - DNA, 57 bp, synthetic construct
  source 1..57: mol_type = other DNA
acgacgctcttccgatctnnnnnnnnacttgctagacaagttgataacggactagcc

SEQ ID NO: 2379 - DNA, 57 bp, synthetic construct
  source 1..57: mol_type = other DNA
acgacgctcttccgatctnnnnnnnnaaccattggacaagttgataacggactagcc

SEQ ID NO: 2380 - DNA, 57 bp, synthetic construct
  source 1..57: mol_type = other DNA
acgacgctcttccgatctnnnnnnnntcgcggttggcaagttgataacggactagcc

SEQ ID NO: 2381 - DNA, 57 bp, synthetic construct
  source 1..57: mol_type = other DNA
acgacgctcttccgatctnnnnnnnncgtagttacccaagttgataacggactagcc

SEQ ID NO: 2382 - DNA, 57 bp, synthetic construct
  source 1..57: mol_type = other DNA
acgacgctcttccgatctnnnnnnnntccaatcatccaagttgataacggactagcc

SEQ ID NO: 2383 - DNA, 57 bp, synthetic construct
  source 1..57: mol_type = other DNA
acgacgctcttccgatctnnnnnnnnaatcgataatcaagttgataacggactagcc

SEQ ID NO: 2384 - DNA, 57 bp, synthetic construct
  source 1..57: mol_type = other DNA
acgacgctcttccgatctnnnnnnnnccattatctacaagttgataacggactagcc

SEQ ID NO: 2385 - DNA, 57 bp, synthetic construct
  source 1..57: mol_type = other DNA
acgacgctcttccgatctnnnnnnnntcaacgtaagcaagttgataacggactagcc

SEQ ID NO: 2386 - DNA, 57 bp, synthetic construct
  source 1..57: mol_type = other DNA
acgacgctcttccgatctnnnnnnnntctaatagtacaagttgataacggactagcc

SEQ ID NO: 2387 - DNA, 57 bp, synthetic construct
  source 1..57: mol_type = other DNA
acgacgctcttccgatctnnnnnnnnaaccgctggtcaagttgataacggactagcc

SEQ ID NO: 2388 - DNA, 57 bp, synthetic construct
  source 1..57: mol_type = other DNA
acgacgctcttccgatctnnnnnnnngatcgcttctcaagttgataacggactagcc

SEQ ID NO: 2389 - DNA, 57 bp, synthetic construct
  source 1..57: mol_type = other DNA
acgacgctcttccgatctnnnnnnnnctaactagatcaagttgataacggactagcc

SEQ ID NO: 2390 - DNA, 57 bp, synthetic construct
  source 1..57: mol_type = other DNA
acgacgctcttccgatctnnnnnnnngctggaacttcaagttgataacggactagcc

SEQ ID NO: 2391 - DNA, 57 bp, synthetic construct
  source 1..57: mol_type = other DNA
acgacgctcttccgatctnnnnnnnnaggttagttccaagttgataacggactagcc

SEQ ID NO: 2392 - DNA, 57 bp, synthetic construct
  source 1..57: mol_type = other DNA
acgacgctcttccgatctnnnnnnnncattcgacggcaagttgataacggactagcc

SEQ ID NO: 2393 - DNA, 57 bp, synthetic construct
  source 1..57: mol_type = other DNA
acgacgctcttccgatctnnnnnnnncattcaatcacaagttgataacggactagcc

SEQ ID NO: 2394 - DNA, 57 bp, synthetic construct
  source 1..57: mol_type = other DNA
acgacgctcttccgatctnnnnnnnncggattagaacaagttgataacggactagcc

SEQ ID NO: 2395 - DNA, 57 bp, synthetic construct
  source 1..57: mol_type = other DNA
acgacgctcttccgatctnnnnnnnnatcggctatccaagttgataacggactagcc

SEQ ID NO: 2396 - DNA, 57 bp, synthetic construct
  source 1..57: mol_type = other DNA
acgacgctcttccgatctnnnnnnnnccttgatcgtcaagttgataacggactagcc

SEQ ID NO: 2397 - DNA, 57 bp, synthetic construct
  source 1..57: mol_type = other DNA
acgacgctcttccgatctnnnnnnnnacgaagtcaacaagttgataacggactagcc

SEQ ID NO: 2398 - DNA, 57 bp, synthetic construct
  source 1..57: mol_type = other DNA
acgacgctcttccgatctnnnnnnnnttacctcgaccaagttgataacggactagcc

SEQ ID NO: 2399 - DNA, 57 bp, synthetic construct
  source 1..57: mol_type = other DNA
acgacgctcttccgatctnnnnnnnnggaggatagccaagttgataacggactagcc

SEQ ID NO: 2400 - DNA, 57 bp, synthetic construct
  source 1..57: mol_type = other DNA
acgacgctcttccgatctnnnnnnnnggctctctatcaagttgataacggactagcc

SEQ ID NO: 2401 - DNA, 53 bp, synthetic construct
  source 1..53: mol_type = other DNA
cgtgtgctcttccgatcttcggattcggatcttgtggaaaggacgaaacaccg

SEQ ID NO: 2402 - DNA, 53 bp, synthetic construct
  source 1..53: mol_type = other DNA
cgtgtgctcttccgatctctaagccttgatcttgtggaaaggacgaaacaccg

SEQ ID NO: 2403 - DNA, 53 bp, synthetic construct
  source 1..53: mol_type = other DNA
cgtgtgctcttccgatctctaactaggtatcttgtggaaaggacgaaacaccg

SEQ ID NO: 2404 - DNA, 53 bp, synthetic construct
  source 1..53: mol_type = other DNA
cgtgtgctcttccgatctgcaagaccgtatcttgtggaaaggacgaaacaccg

SEQ ID NO: 2405 - DNA, 53 bp, synthetic construct
  source 1..53: mol_type = other DNA
cgtgtgctcttccgatctatggaacgaaatcttgtggaaaggacgaaacaccg

SEQ ID NO: 2406 - DNA, 53 bp, synthetic construct
  source 1..53: mol_type = other DNA
cgtgtgctcttccgatcttagaggcgttatcttgtggaaaggacgaaacaccg

SEQ ID NO: 2407 - DNA, 53 bp, synthetic construct
  source 1..53: mol_type = other DNA
cgtgtgctcttccgatctgcatcgtatgatcttgtggaaaggacgaaacaccg

SEQ ID NO: 2408 - DNA, 53 bp, synthetic construct
  source 1..53: mol_type = other DNA
cgtgtgctcttccgatcttggacgactaatcttgtggaaaggacgaaacaccg

SEQ ID NO: 2409 - DNA, 35 bp, synthetic construct
  source 1..35: mol_type = other DNA
ggctttatatatcttgtggaaaggacgaaacaccg

SEQ ID NO: 2410 - DNA, 35 bp, synthetic construct
  source 1..35: mol_type = other DNA
gtttaagagctatgctggaaacagcatagcaagtt

SEQ ID NO: 2411 - DNA, 18 bp, synthetic construct
  source 1..18: mol_type = other DNA
acgacgctcttccgatct

SEQ ID NO: 2412 - DNA, 21 bp, synthetic construct
  source 1..21: mol_type = other DNA
caagttgataacggactagcc

SEQ ID NO: 2413 - DNA, 18 bp, synthetic construct
  source 1..18: mol_type = other DNA
acgacgctcttccgatct

SEQ ID NO: 2414 - DNA, 15 bp, synthetic construct
  source 1..15: mol_type = other DNA
ttttttttttttttt

SEQ ID NO: 2415 - DNA, 29 bp, synthetic construct
  source 1..29: mol_type = other DNA
aatgatacggcgaccaccgagatctacac

SEQ ID NO: 2416 - DNA, 15 bp, synthetic construct
  source 1..15: mol_type = other DNA
acactctttccctac

SEQ ID NO: 2417 - DNA, 24 bp, synthetic construct
  source 1..24: mol_type = other DNA
caagcagaagacggcatacgagat

SEQ ID NO: 2418 - DNA, 15 bp, synthetic construct
  source 1..15: mol_type = other DNA
gtctcgtgggctcgg

SEQ ID NO: 2419 - DNA, 24 bp, synthetic construct
  source 1..24: mol_type = other DNA
caagcagaagacggcatacgagat

SEQ ID NO: 2420 - DNA, 34 bp, synthetic construct
  source 1..34: mol_type = other DNA
gtgactggagttcagacgtgtgctcttccgatct

SEQ ID NO: 2421 - DNA, 18 bp, synthetic construct
  source 1..18: mol_type = other DNA
cgtgtgctcttccgatct

SEQ ID NO: 2422 - DNA, 25 bp, synthetic construct
  source 1..25: mol_type = other DNA
atcttgtggaaaggacgaaacaccg

SEQ ID NO: 2423 - DNA, 29 bp, synthetic construct
  source 1..29: mol_type = other DNA
aatgatacggcgaccaccgagatctacac

SEQ ID NO: 2424 - DNA, 58 bp, synthetic construct
  source 1..58: mol_type = other DNA
acactctttccctacacgacgctcttccgatctatcttgtggaaaggacgaaacaccg

SEQ ID NO: 2425 - DNA, 24 bp, synthetic construct
  source 1..24: mol_type = other DNA
caagcagaagacggcatacgagat

SEQ ID NO: 2426 - DNA, 57 bp, synthetic construct
  source 1..57: mol_type = other DNA
gtgactggagttcagacgtgtgctcttccgatctccgactcggtgccactttttcaa

SEQ ID NO: 2427 - DNA, 25 bp, synthetic construct
  source 1..25: mol_type = other DNA
caccggaagcgcgtccagaccgcgg

SEQ ID NO: 2428 - DNA, 25 bp, synthetic construct
  source 1..25: mol_type = other DNA
aaacccgcggtctggacgcgcttcc

SEQ ID NO: 2429 - DNA, 25 bp, synthetic construct
  source 1..25: mol_type = other DNA
caccggggaaccacatggaattcga

SEQ ID NO: 2430 - DNA, 25 bp, synthetic construct
  source 1..25: mol_type = other DNA
aaactcgaattccatgtggttcccc

SEQ ID NO: 2431 - DNA, 25 bp, synthetic construct
  source 1..25: mol_type = other DNA
caccgccagcattaactccgctgag

SEQ ID NO: 2432 - DNA, 25 bp, synthetic construct
  source 1..25: mol_type = other DNA
aaacctcagcggagttaatgctggc

SEQ ID NO: 2433 - DNA, 25 bp, synthetic construct
  source 1..25: mol_type = other DNA
caccgttttaccttgttcacatgga

SEQ ID NO: 2434 - DNA, 25 bp, synthetic construct
  source 1..25: mol_type = other DNA
aaactccatgtgaacaaggtaaaac

SEQ ID NO: 2435 - DNA, 21 bp, synthetic construct
  source 1..21: mol_type = other DNA
tcgacatccgcaacgactatc

SEQ ID NO: 2436 - DNA, 22 bp, synthetic construct
  source 1..22: mol_type = other DNA
ccagggcgtagttgtagaagag

SEQ ID NO: 2437 - DNA, 21 bp, synthetic construct
  source 1..21: mol_type = other DNA
ggagcgagatccctccaaaat

SEQ ID NO: 2438 - DNA, 23 bp, synthetic construct
  source 1..23: mol_type = other DNA
ggctgttgtcatacttctcatgg

SEQ ID NO: 2439 - DNA, 35 bp, synthetic construct; identical to SEQ ID NO: 2409
  source 1..35: mol_type = other DNA

SEQ ID NO: 2440 - DNA, 35 bp, synthetic construct
  source 1..35: mol_type = other DNA
aacttgctatgctgtttccagcatagctcttaaac

SEQ ID NO: 2441 - DNA, 97 bp, synthetic construct
  source 1..97: mol_type = other DNA
aatgatacggcgaccaccgagatctacacacggtcatcaacactctttccctacacgacgctcttccgatctatcttgtggaaaggacgaaacaccg

SEQ ID NO: 2442 - DNA, 97 bp, synthetic construct
  source 1..97: mol_type = other DNA
aatgatacggcgaccaccgagatctacaccgaccgagagacactctttccctacacgacgctcttccgatctatcttgtggaaaggacgaaacaccg

SEQ ID NO: 2443 - DNA, 91 bp, synthetic construct
  source 1..91: mol_type = other DNA
caagcagaagacggcatacgagatcttctggtccgtgactggagttcagacgtgtgctcttccgatctccgactcggtgccactttttcaa

SEQ ID NO: 2444 - DNA, 91 bp, synthetic construct
  source 1..91: mol_type = other DNA
caagcagaagacggcatacgagattcctccatacgtgactggagttcagacgtgtgctcttccgatctccgactcggtgccactttttcaa

SEQ ID NO: 2445 - DNA, 34 bp, synthetic construct
  source 1..34: mol_type = other DNA
  modified_base 1..34: mod_base = OTHER; note = phosphorothioate bonds
  modified_base 34: mod_base = OTHER; note = dideoxycytidine
agatcggaagagcgtcgtgtagggaaagagtgtc

SEQ ID NO: 2446 - DNA, 29 bp, synthetic construct
  source 1..29: mol_type = other DNA
aatgatacggcgaccaccgagatctacac

SEQ ID NO: 2447 - DNA, 26 bp, synthetic construct
  source 1..26: mol_type = other DNA
acgacgctcttccgatctnnnnnnnn

SEQ ID NO: 2448 - DNA, 32 bp, synthetic construct
  source 1..32: mol_type = other DNA
ttttttttttttttttttttttttttttttvn

SEQ ID NO: 2449 - DNA, 24 bp, synthetic construct
  source 1..24: mol_type = other DNA
ccctacacgacgctcttccgatct

SEQ ID NO: 2450 - DNA, 34 bp, synthetic construct
  source 1..34: mol_type = other DNA
gtctcgtgggctcggagatgtgtataagagacag

SEQ ID NO: 2451 - DNA, 19 bp, synthetic construct
  source 1..19: mol_type = other DNA
ctgtctcttatacacatct
